(19) United States
(12) Patent Application Publication
(10) Pub. No.: US 2024/0279629 A1
(43) Pub. Date: Aug. 22, 2024

(54) CRISPR-TRANSPOSON SYSTEMS FOR DNA MODIFICATION

(71) Applicant: The Trustees of Columbia University in the City of New York, New York, NY (US)

(72) Inventors: Samuel Henry Sternberg, New York, NY (US); George Davis Lampe, New York, NY (US); Rebeca Teresa King Davidson, New York, NY (US); Alejandro Chavez, New York, NY (US); Sanne Eveline Klompe, New York, NY (US)

(21) Appl. No.: 18/567,617

(22) PCT Filed: Jun. 7, 2022
(86) PCT No.: PCT/US22/32541

§ 371 Date: Dec. 6, 2023

Related U.S. Application Data
(60) Provisional application No. 63/284,837, filed on Dec. 1, 2021.
(60) Provisional application No. 63/236,337, filed on Aug. 24, 2021.
(60) Provisional application No. 63/211,631, filed on Jun. 17, 2021.
(60) Provisional application No. 63/197,889, filed on Jun. 7, 2021.

(51) Int. Cl. C12N 9/22; C07K 14/195; C12N 15/11; C12N 15/63; C12N 15/90

(52) U.S. Cl. CPC C12N 9/22; C07K 14/195; C12N 15/111; C12N 15/63; C12N 15/90; C07K 2319/09; C12N 2310/20

(57) ABSTRACT

The present disclosure provides systems, kits, and methods for nucleic acid integration utilizing engineered Clustered Regularly Interspaced Short Palindromic Repeats (CRISPR)-CRISPR-associated transposon (CRISPR-Tn) system. More particularly, the present disclosure provides systems comprising: an engineered CRISPR-Tn system or one or more nucleic acids encoding the engineered CRISPR-Tn system, wherein the CRISPR-Tn system comprises at least one or both of: a) at least one Cas protein (e.g., Cas6, Cas7, Cas5, and/or Cas8); and b) one or more transposon-associated proteins (e.g., TnsA, TnsB, TnsC, TnsD, and/or TniQ). The present disclosure also provides systems, kits, and methods for nucleic acid integration in a eukaryotic cell.

### STATEMENT REGARDING FEDERALLY-SPONSORED RESEARCH OR DEVELOPMENT

[0001] This invention was made with government support under grant number HG011650 awarded by the National Institutes of Health. The government has certain rights in the invention.

### FIELD

[0002] The present invention relates to methods and systems for DNA modification and gene targeting comprising engineered Clustered Regularly Interspaced Short Palindromic Repeats (CRISPR)-associated transposon (CRISPR-Tn) system. Particularly, the present invention relates to methods and systems for RNA-guided DNA integration comprising engineered CRISPR-associated transposon systems.

### CROSS-REFERENCE TO RELATED APPLICATIONS

[0003] This application claims the benefit of U.S. Provisional Application Nos. 63/197,889, filed Jun. 7, 2021, 63/211,631, filed Jun. 17, 2021, 63/236,337, filed Aug. 24, 2021, and 63/284,837, filed Dec. 1, 2021, the contents of each of which are herein incorporated by reference in their entirety.

### SEQUENCE LISTING STATEMENT

[0004] The text of the computer readable sequence listing filed herewith, titled “39595-601_SEQUENCE_LISTING_ST25”, created Jun. 7, 2022, having a file size of 1,992,779 bytes, is hereby incorporated by reference in its entirety.

### BACKGROUND

[0005] CRISPR-Cas systems are prokaryotic immune systems that confer resistance to foreign genetic elements such as plasmids and bacteriophages. The canonical CRISPR/Cas9 system exploits RNA-guided DNA-binding and sequence-specific cleavage of a target DNA. A guide RNA (gRNA) is complementary to a target DNA sequence upstream of a PAM (protospacer adjacent motif) site. The Cas (CRISPR-associated) 9 protein binds to the gRNA and the target DNA, and introduces a double-strand break (DSB) in a defined location upstream of the PAM site. The ability of the CRISPR-Cas9 system to be programmed to cleave not only viral DNA but also other genes opened a new venue for genome engineering.

[0006] The past decade has revealed an astounding diversity of CRISPR-Cas systems that utilize RNA guides for sequence-specific nucleic acid targeting, thereby providing host organisms with adaptive immunity against invading mobile genetic elements (MGEs). CRISPR-Cas systems are currently grouped into two classes (1-2), six types (I-VI) and dozens of subtypes, depending on the signature and accessory genes that accompany the CRISPR array. Although RNA-guided targeting typically leads to endonucleolytic cleavage of the bound substrate, recent studies have uncovered a range of noncanonical pathways in which CRISPR protein-RNA effector complexes have been naturally repurposed for alternative functions.

### SUMMARY

[0007] Provided herein are systems, kits, and methods that facilitate nucleic acid editing, particularly systems, kits, and methods that facilitate RNA-guided nucleic acid integration

[0008] Provided herein are systems for DNA integration into a target nucleic acid sequence comprising: an engineered Clustered Regularly Interspaced Short Palindromic Repeats (CRISPR)-CRISPR associated (Cas) transposon (CRISPR-Tn) system or one or more nucleic acids encoding the engineered CRISPR-Tn system, wherein the CRISPR-Tn system comprises at least one or both of: a) at least one Cas protein; and b) one or more transposon-associated proteins.

[0009] In some embodiments, each of the at least one Cas protein and one or more of the at least one transposon-associated protein are part of a single fusion protein.

[0010] The systems or kits may further comprise c) at least one gRNA (gRNA) or a nucleic acid encoding a gRNA, wherein the at least one gRNA is complementary to at least a portion of a target nucleic acid sequence. In some embodiments, the at least one gRNA is a non-naturally occurring gRNA. In some embodiments, the at least one gRNA is encoded in a CRISPR RNA (crRNA) array. In some embodiments, the at least one gRNA is transcribed under control of an RNA Polymerase II or an RNA Polymerase III promoter.

[0011] In some embodiments one or more of the at least one Cas protein are part of a$ ribonucleoprotein complex with the gRNA.

[0012] In some embodiments, the at least one Cas protein is derived from a Type I CRISPR-Cas system (e.g., Type I-F, Type I-B). In some embodiments, the at least one Cas protein comprises Cas5, Cas6, Cas7, and Cas8. In some embodiments, the at least one Cas protein comprises Cas8-Cas5 fusion protein.

[0013] In some embodiments, the at least one transposon protein is derived from a Tn7 or Tn7-like transposon system. In some embodiments, the at least one transposon-associated protein comprises TnsB and TnsC. In some embodiments, the at least one transposon-associated protein comprises TnsA, TnsB, and TnsC.

[0014] In some embodiments, the at least one transposon protein comprises a InsA-TnsB fusion protein. In some embodiments, the TnsA-TnsB fusion protein further comprises an amino acid linker between TnsA and InsB. The linker may be a flexible linker. In some embodiments, the linker comprises at least one glycine-rich region. In some embodiments, the linker comprises a NLS sequence. In some embodiments, the linker comprises a NLS sequence flanked on each end by a glycine rich region.

[0015] In some embodiments, the at least one transposon-associated protein comprises TnsD and/or TniQ.

[0016] In some embodiments, the CRISPR-Tn system is derived from Vibrio cholerae, Photobacterium iliopiscarium, Vibrio parahaemolyticus, Pseudoalteromonas sp., Pseudoalteromonas ruthenica, Photobacterium ganghwense, Shewanella sp., Vibrio diazotrophicus, Vibrio sp. 16, Vibrio sp. F12, Vibrio splendidus, Aliivibrio wodanis, Aliivibrio sp., Endozoicomonas ascidiicola, and Parashewanella spongiae.

[0017] In some embodiments, one or more of the at least one Cas protein and the at least one transposon-associated protein comprises a nuclear localization signal (NLS). In some embodiments, one or more of the at least one Cas protein and the at least one transposon-associated protein comprises two or more NLSs. In some embodiments, the NLS is appended to the one or more of the at least one Cas protein and the at least one transposon-associated protein at a N-terminus, a C-terminus, or a combination thereof.

[0018] The NLS may be a monopartite sequence or a bipartite sequence. In some embodiments, the NLS comprises a sequence having at least 70% similarity to KRTADGSEFESPKKKRKV (SEQ ID NO:89).

[0019] In some embodiments, the one or more nucleic acids comprises one or more messenger RNAs, one or more vectors, or a combination thereof.

[0020] In some embodiments, the at least one Cas protein, the at least one transposon-associated protein, and the gRNA are encoded by different nucleic acids.

[0021] In some embodiments, one or more of the at least one Cas protein, the at least one transposon-associated protein, and the gRNA are encoded by a single nucleic acid.

[0022] In certain embodiments, Cas7 is encoded by an individual nucleic acid. In certain embodiments, Cas7 or the nucleic acid encoding Cas7 is in greater abundance compared to the remaining protein components or nucleic acids encoding thereof.

[0023] In some embodiments, a single nucleic acid encodes the gRNA and at least one Cas protein (e.g., Cas6 or Cas7).

[0024] In some embodiments, each of the at least one Cas protein, the at least one transposon-associated protein, and the gRNA are encoded by a single nucleic acid.

[0025] In some embodiments, the one or more nucleic acids further comprises or encodes a sequence capable of forming a triple helix downstream of the sequence encoding the at least one Cas protein or the sequence encoding the at least one transposon-associated protein. In some embodiments, the sequence capable of forming a triple helix is in a 3′ untranslated region of the sequence encoding the at least one Cas protein or the sequence encoding the at least one transposon-associated protein.

[0026] In some embodiments, one or more of the nucleic acids encoding at least one Cas protein and the nucleic acids encoding the at least one transposon-associated protein comprises a sequence encoding a ribosome skipping peptide. In some embodiments, the ribosome skipping peptide comprises a 2A family peptide.

[0027] In some embodiments, the systems further comprise a donor nucleic acid to be integrated, wherein said donor DNA comprises a cargo nucleic acid sequence flanked by at least one transposon end sequence.

[0028] Additionally, provided herein are systems for DNA integration into a target nucleic acid sequence comprising: an engineered Clustered Regularly Interspaced Short Palindromic Repeats (CRISPR)-CRISPR associated (Cas) transposon (CRISPR-Tn) system or one or more nucleic acids encoding the engineered CRISPR-Tn system, wherein the CRISPR-Tn system comprises at least one or both of: a) at least one Cas protein; and b) TnsA, TnsB, TnsC, or a combination thereof. In some embodiments, the engineered CRISPR-Tn system is derived from Vibrio parahaemolyticus, Aliibrio sp., Pseudoalteromonas sp., or Endozoicomonas ascidiicola. In some embodiments, the engineered CRISPR-Tn system is a Type I-F system (e.g., a Type I-F3 system).

[0029] In some embodiments, the one or more nucleic acids comprises one or more messenger RNAs, one or more vectors, or a combination thereof.

[0030] In some embodiments, wherein the one or more nucleic acids further comprise or encode a sequence capable of forming a triple helix downstream of the sequence encoding the engineered CRISPR-Tn system. In some embodiments, the sequence capable of forming a triple helix is in a 3′ untranslated region of the sequence encoding the at least one Cas protein or the sequence encoding at least one of TnsA, TnsB, TnsC, TnsD, and TniQ.

[0031] In some embodiments, one or more of the nucleic acids encoding the engineered CRISPR-Tn system comprises a sequence encoding a ribosome skipping peptide. In some embodiments, the ribosome skipping peptide comprises a 2A family peptide.

[0032] In some embodiments, the at least one Cas protein and the TnsA, TnsB, and TnsC are encoded by different nucleic acids. In some embodiments, the at least one Cas protein and the TnsA, TnsB, and TnsC are encoded by a single nucleic acid.

[0033] In some embodiments, the at least one Cas protein comprises Cas5, Cas6, Cas7, and Cas8. In some embodiments, the at least one Cas protein comprises Cas8-Cas5 fusion protein. In certain embodiments, Cas7 or the nucleic acid encoding Cas7 is in greater abundance compared to the remaining protein components or nucleic acids encoding thereof.

[0034] In some embodiments, the engineered CRISPR-Tn system further comprises TnsD, TniQ, or a combination thereof or a nucleic acid encoding TnsD, TniQ, or a combination thereof.

[0035] In some embodiments, the engineered CRISPR-Tn system comprises Cas5, Cas6, Cas7, Cas8, TnsA, TnsB, TnsC, and at least one or both of TnsD or TniQ. In some embodiments, the engineered CRISPR-Tn system comprises TnsA, TnsB, TnsC, TnsD and TniQ.

[0036] In some embodiments, one or more of the at least one Cas protein, TnsA, TnsB, TasC, TnsD, and TniQ comprises a nuclear localization signal (NLS). In some embodiments, one or more of the at least one Cas protein, TnsA, TnsB, TnsC, TnsD, and TniQ comprises two or more NLSs. In some embodiments, the NLS is appended to the one or more of the at least one Cas protein, TnsA, TnsB, TnsC, TnsD, and TniQ at a N-terminus, a C-terminus, or a combination thereof.

[0037] In some embodiments, TnsA and InsB are provided as a TnsA-TnsB fusion protein. In some embodiments, the TnsA-TnsB fusion protein further comprises an amino acid linker between TnsA and TnsB. In some embodiments, the linker is a flexible linker. In some embodiments, the linker comprises at least one glycine-rich region.

[0038] In some embodiments, the linker comprises a nuclear localization signal (NLS). In some embodiments, the linker comprises a NLS flanked on each end by a glycine rich region.

[0039] In some embodiments, the NLS is a monopartite sequence. In some embodiments, the NLS is a bipartite sequence. In some embodiments, the NLS comprises a sequence having at least 70% similarity to KRTADGSEFESPKKKRKV (SEQ ID NO:89).

[0040] In some embodiments, the engineered CRISPR-Tn system further comprises a gRNA (also referred to herein as CRISPR RNA, or crRNA) complementary to at least a portion of the target nucleic acid sequence, or a nucleic acid encoding the at least one gRNA. In some embodiments, the at least one gRNA is encoded by a nucleic acid different from the nucleic acid(s) encoding the at least one Cas protein and TnsA, TnsB, and TnsC. In some embodiments, the at least one gRNA is encoded by a nucleic acid also encoding the at least one Cas protein, TnsA, TnsB, and TnsC, or both.

[0041] In some embodiments, the at least one gRNA is a non-naturally occurring gRNA. In some embodiments, the at least one gRNA is encoded in a CRISPR RNA (crRNA) array.

[0042] In some embodiments, the system further comprises a target nucleic acid sequence. In some embodiments, the target nucleic acid sequence comprises a human sequence. In some embodiments, the target nucleic acid sequence comprises a TnsD binding site.

[0043] In some embodiments, the systems further comprise a donor nucleic acid flanked by at least one transposon end sequence. In some embodiments, the donor nucleic acid comprises a human nucleic acid sequence. In some embodiments, the nucleic acid encoding the at least one Cas protein, TnsA, TnsB, and TnsC, the at least one gRNA, or any combination thereof further comprises the donor nucleic acid.

[0044] In some embodiments, the system is a cell-free system.

[0045] In addition, compositions comprising the disclosed systems are provided herein.

[0046] Also provided are cells comprising the disclosed systems. In some embodiments, the cell is a prokaryotic cell. In some embodiments, the cell is a eukaryotic cell (e.g., a mammalian cell or a human cell).

[0047] Further disclosed are methods for DNA integration comprising contacting a target nucleic acid sequence with a system or a composition disclosed herein.

[0048] In some embodiments, the target nucleic acid sequence is in a cell. In some embodiments, contacting a target nucleic acid sequence comprises introducing the system into the cell. In some embodiments, the cell is a prokaryotic cell. In some embodiments, the cell is a eukaryotic cell (e.g., a mammalian cell or a human cell).

[0049] In some embodiments, introducing the system into the cell comprises administering the system to a subject. In some embodiments, administering comprises in vivo administration. In some embodiments, administering comprises transplantation of ex vivo treated cells comprising the system.

[0050] Kits comprising any or all of the components of the systems described herein are also provided. In some embodiments, the kit further comprises one or more reagent, shipping and/or packaging containers, one or more buffers, a delivery device, instructions, or a combination thereof.

[0051] Other aspects and embodiments of the disclosure will be apparent in light of the following detailed description.

### BRIEF DESCRIPTION OF THE DRAWINGS

[0052] FIGS. 1A-1E show RNA-guided transposition activity of type I-F3 CRISPR-Tn. FIG. 1A is the genomic layout of Tn6677 (V. cholerae INTEGRATE). The machinery required for transposon mobilization can be functionally divided into the transposition module that facilitates excision and integration of the transposon (TnsA-TnsB) through interactions with a regulator protein (TnsC), and a DNA-targeting module that identifies the site for integration. Type I-F CRISPR-Tn use the RNA-guided DNA-binding complex TniQ-Cascade (crRNA₁Cas8₁Cas7₆Cas6₁ TniQ₂) for target site determination. L, left end; R, right end. FIG. 1B is an overview of selected Type I-F3 CRISPR-Tn systems. Location refers to the host gene found adjacent to the right end of transposon, which provides a target for the atypical crRNA homing pathway; no atypical homing crRNA was found for Tn7017/parE, marked with an *. FIG. 1C is a schematic representation of a transposition assay in which a mini-Tn is targeted to a site in the E. coli genome and detected via junction PCR. FIG. 1D is a graph of the integration efficiency for all the systems at 37° C., measured by qPCR. ND, not detected. FIG. 1E is a graph of the integration efficiency for Tn7017at 25° C. and 37° C., measured by qPCR. ND, not detected. Data in FIGS. 1D and 1E are shown as mean±s.d. for n=3 biologically independent samples.

[0053] FIGS. 2A-2D show the PAM requirements and integration site variation for CRISPR-Tn systems. FIG. 2A is a schematic representation of a PAM library in which a pTarget plasmid encodes a 32-bp target sequence flanked by a 5-bp degenerate sequence. FIG. 2B is violin plots of PAM enrichment for Tn6999 (Type V-K CRISPR-Tn, ShoINT) and Tn7016. Lines represent 10-fold enrichment or depletion. *, PAM sequences not detected in the final library. FIG. 2C is WebLogos of top 5% enriched PAM sequences and integration site distribution obtained from the PAM library data for Tn7016 and Tn6999. d, distance in bp from the 3′ end of the target to the transposon. FIG. 2D is a graph of integration efficiencies for TN7016 and PAMs indicated, normalized to a ‘CC’ PAM. Data are shown as mean±s.d. for n=3 biologically independent samples.

[0054] FIGS. 3A-3D show Tn7017 exploits distinct TniQ homologs for two different targeting pathways. FIG. 3A is a schematic representation of Tn7017, showing the presence of two distinct ThiQ/TnsD genes. FIG. 3B is a pruned phylogenetic tree of TniQ/TnsD with different Tn7-like transposons and CRISPR-Tn systems (I-B1, I-B2, and I-F3) indicated. ‘TniQ’ and ‘TnsD’ are used to describe TiQ/TnsD proteins involved in the RNA-guided or protein-mediated homing pathway, respectively Two clades of I-F3-TnsD proteins are shown, the darker hue indicates the putative homing TosD proteins described in Petassi et al. (Cell 183, 1757-1771.e18), while the lighter color clade includes TnsD from Tn7017. FIG. 3C is a transposition assay design for simultaneous detection of DNA integration at a genomic target site (RNA-guided) and a putative, plasmid-borne homing site (RNA-independent). FIG. 3D is a graph of integration efficiency for pTarget and the genomic target site, as measured by qPCR, under different gene deletion conditions. Data are shown as mean±s.d. for n=3 biologically independent samples.

[0055] FIG. 4A is a schematic of a pooled library approach to determine cross-reactivity between protein-RNA machinery and the mini-transposon DNA. FIG. 4B is a graph of relative integration efficiency for Tn7016, tested in a strain with or without a pre-existing mini-Tn6677, measured by qPCR. These data demonstrate that orthogonal CRISPR-Tn systems can be used for high-efficiency tandem insertions of genetic payloads.

[0056] FIGS. 5A-5F show transposition activity of type I-F3 CRISPR-Tn under different conditions. FIG. 5A is a graph of integration efficiency for the systems as indicated using the crRNA and temperature conditions shown, measured by qPCR. FIG. 5B shows possible mini-Tn integration orientations (top right), and the observed bias (tRL:tLR) for each CRISPR-Tn system under the temperature conditions shown, determined from qPCR measurements (bottom left). Integration orientation data may be skewed for low efficiency systems because of detection limitations. FIG. 5C is a layout of typical (dark grey diamonds) and atypical (light grey diamonds) repeats within the native CRISPR array(s). Atypical spacers (light grey squares) and their target genes (yciA, ffs, and rsm.J) are indicated. The bracketed number indicates the length of the atypical spacer. FIG. 5D is consensus logos of the safe harbor loci targeted by atypical spacers for the systems. The atypical guide RNAs targeting these sites are indicated above the consensus logos with flipped-out bases (light grey) and mismatched bases (dark grey) indicated in bars above the sequence. FIG. 5E is consensus logos of typical and atypical repeats, revealing loss of conservation for the last 8 bp of the atypical repeats. FIG. 5F is a graph of the integration efficiency as determined by qPCR for 32 bp spacers with atypical repeats.

[0057] FIGS. 6A-6D show PAM requirements and integration site variation. FIG. 6A is violin plots displaying the enrichment of PAM variants as a result of RNA-guided transposition for different CRISPR-Tn systems. CRISPR-Tn with <0.05% integration activity is masked in grey since their activity may have bottlenecked PAM representation. FIGS. 6B and 6C are WebLogos for the top (FIG. 6B) or bottom (FIG. 6C) 5% enriched PAM sequences per CRISPR-Tn system. The base positions are numbered from the protospacer start, with −1 representing the base immediately adjacent to the protospacer. Low sequence conservation represents the absence of sequence restraints and therefore more flexible PAM requirements. CRISPR-Tn with <0.05% integration activity is masked in grey since their activity may have bottlenecked PAM representation. FIG. 6D is a graph of integration site distribution for ‘CC’ PAMs obtained from the PAM library dataset. Systems with >0.5% total integration efficiency at 37° C. are shown. The distance from target site is the number of bases between the terminal base of the protospacer and the first base of the transposon sequence (and therefore includes the 5-bp target site duplication). Orange indicates a distance of 49-bp away, which is the primary integration site for many of the CRISPR-Tn.

[0058] FIG. 7A is a comparison of predicted protein domains of EcoTnsD (Tn7), EasTnsD (Tn7017), and EasTniQ (Tn7017). Predicted TniQ (PF06527) and TnsD (PF15978) domains from InterProScan analysis are shown. FIG. 7B is integration efficiency at the genomic protospacer with or without pTarget present, under different gene deletion environments.

[0059] FIG. 8 is a schematic of the genomic layout and cargo analysis of native CRISPR-transposons. CRISPR-Tn systems encode multiple cargo genes in addition to the transposition and CRISPR-Cas operons. The native genomic layout of CRISPR-transposon in this study is shown, and putative defense systems are indicated based on pfam.

[0060] FIG. 9 is a table of homologous CRISPR-transposon systems. The table describes CRISPR-Tn systems described herein. Each system may be alternately referred to by a dedicated Tn identifier (Tn #), a homolog identifier (Homolog #), the organism from which the transposon derives, and/or a simplified ID that derives from the organism name. Mini-transposon donor DNA substrates and expression vectors encoding the protein-RNA machinery from each system are designed and constructed using sequence information derived from the transposon.

[0061] FIG. 10A is a vector map of a pcDNA3.1 derivative plasmid, with a representative depiction of a cas6 gene under CMV promoter control, with N-terminal nuclear localization signal (NLS) and 3×FLAG epitope tags. pA, polyadenylation signal. FIG. 10B is Western blots for various Cas6 constructs. The ID shown correlates to FIG. 9. (−) represents the native DNA sequence for each Cas6 species; (+) refers to human codon optimization of the cas6 gene sequence. Beta-actin was stained as a loading control.

[0062] FIGS. 11A-11E show a GFP repression assay to assess guide RNA processing by Cas6. FIG. 11A shows an exemplary plasmid design for Cas6 expression and Direct-Repeat (DR) GFP reporter plasmids within a pcDNA3.1-derivative expression vector. The DR for Vch is shown (SEQ ID NO: 295), as well as the Cas6 cleavage site (red arrow). FIG. 11B is a schematic of the GFP repression assay. When the DR-GFP plasmid is transfected alone, successful transcription and translation of GFP occurs, leading to elevated levels of GFP fluorescence as measured by flow cytometry. The stem loop within the Direct Repeat is formed in the 5′ UTR, downstream of the 5′ cap (red circle). When a plasmid encoding the cognate Cas6 is co-transfected, Cas6 binds to the stem loop in the 5′-UTR and cleaves the mRNA. This leads to loss of the 5′ cap, RNA degradation, and a loss of GFP fluorescence. FIG. 11C is representative raw flow cytometry data for Cas6 and its cognate DR from a canonical Type I-F1 CRISPR-Cas system derived from Pseudomonas aeruginosa (Pae), or from the Type I-F3 CRISPR-Cas system derived from the Vibrio cholerae HE-45 CRISPR-Tn system (Tn6677, Vch). Cells were transfected with either the DR-GFP plasmid alone (left), or the DR-GFP plasmid together with Cas6 expression plasmid (right). In the presence of Cas6, a severe reduction in GFP fluorescence is observed. FIG. 11D is a bar graph showing relative GFP mean fluorescence intensity (MFI) for the GFP repression assay using various Cas6 homologs and different fusion constructs. Cas6 tags such as NLSs were appended either N-terminally (e.g., NLS-Cas6) or C-terminally (e.g., Cas6-NLS). Data were normalized to the DR-GFP only control. FIG. 11E is a bar graph of relative GFP MFI for additional Cas6 homologs, denoted belong the graph. The numbers above each bar within FIGS. 11D-11E represent experimental identifiers that correspond to the information described in Table 3.

[0063] FIGS. 12A-12E show the tdTomato activation assay to assess transposon DNA binding by TnsB. FIG. 12A is a schematic and sequence of right (SEQ ID NO: 297) and left (SEQ ID NO: 296) transposon ends derived from V. cholerae Tn6677 (e.g., VchINTEGRATE). Putative TnsB binding sites are highlighted in blue boxes (top) and represented by blue arrows (bottom). FIG. 12B is an exemplary plasmid design for TnsB-NLS-VP64 activator construct within a pcDNA3.1-derivative expression vector. FIG. 12C is a schematic of the activation assay. A reporter plasmid contains a minimal CMV promoter, a tdTomato expression cassette, and a CRISPR-transposon end. Two orientations of the right end shown in FIG. 12A were tested. When transfected alone, the reporter minimally expresses tdTomato. When a plasmid expressing TnsB-VP64 is co-transfected, it binds to the transposon end, leading to elevated levels of tdTomato expression. FIG. 12D is a bar graph showing tdTomato activation for various tdTomato reporter plasmids with VchTnsB-VP64. The negative control represents a plasmid that did not contain a transposon end inserted upstream of the minimal CMV promoter. The only substantive transcriptional activation is observed with the RE Fwd Reporter when co-transfected with the TnsB-bpNLS-VP64 construct. TdTomato MFI is plotted relative to experimental ID 27. FIG. 12E is a bar graph showing tdTomato activation for additional TnsB homologs. The numbers above each bar within FIGS. 12D-12E represent experimental identifiers that correspond to the information described in Table 3.

[0064] FIGS. 13A-13F show development and characterization of a InsAB fusion polypeptide. FIG. 13A is a schematic of fusion of InsA and TnsB leading to a single InsAB polypeptide. FIG. 13B is a graph of the E. coli integration efficiency of Vch INTEGRATE (derived from Tn6677) with various tags appended to TnsA and/or TnsB. N-terminal NLS tagging of TnsA, and C-terminal 2A tagging of TnsB, both lead to severe reductions in integration. Efficiencies are shown for both tRL and tLR orientation products, and are normalized to the WT system. FIG. 13C is a schematic of an exemplary engineered TnsAB fusion containing an internal BP NLS (SEQ ID NO: 89) and glycine-serine linkers (L) (SEQ ID NO: 298). The inset (below) shows the primary amino acid sequence (positions 224-266 of SEQ ID NO: 96) for the insertion, color coded as in the top diagram. FIG. 13D is a graph of the E. coli integration efficiency for various TnsA-TnsB fusion (InsABf) constructs, in which various NLS tags were placed either N-terminally, C-terminally, or internally. The internal bpNLS tag, as schematized in FIG. 13C, has even higher activity than WT TnsA+TnsB. FIG. 13E is HEK293T Western Blot data for TnsA(bpNLS)B_{f} protein, after nuclear and cytoplasm fractionation. HDAC1 was used as a nuclear-specific control, and alpha-tubulin was used as a cytoplasmic-specific control. These data demonstrate efficient expression of the full-length fusion polypeptide. FIG. 13F is TdTomato transcriptional activation using TnsAB_{f}, applying methods described in FIG. 12. The numbers above each bar within FIGS. 13B, 13D, and 13F represent experimental identifiers that correspond to the information described in Table 3.

[0065] FIGS. 14A-14C show a plasmid-to-plasmid transposition assay to reconstitute human cell RNA-guided DNA integration activity with VchINTEGRATE. FIG. 14A is a schematic of exemplary pDonor and pTarget plasmids used to reconstitute plasmid-to-plasmid RNA-guided DNA integration in HEK293T cells; the integrated pTarget product DNA is shown at the right. The relevant origins of replication, antibiotic resistance markers, and mini-transposon (Mini-Tn), are shown. The sequence targeted by the gRNA encoded on pSL2084 is represented with a maroon rectangle, and the PAM is shown in yellow. Genes and other regulator components are not shown to scale. FIG. 14B is a schematic of the overall strategy, in which pDonor, pTarget, and protein/gRNA expression plasmids are used to co-transfect HEK293T cells, allowing for RNA-guided DNA integration to proceed during the 48-72 growth post-transfection. Plasmid DNA is then purified from the cell population and used to transform E. coli NEB 10-beta cells. Notably, pDonor is unable to replicate in this cell strain, such that chloramphenicol-resistant (CmR+) colonies are only expected to arise from the successful transposition of the mini-Tn (encoding CmR) to pTarget. FIG. 14C is a table of plasmids that are used to co-transfect HEK293T cells in these experiments, with a simplified plasmid name (left), a brief description of the plasmid function (right), and a numeric ID associated with the specific plasmid (middle). The sequence of each plasmid, according to this ID, is described in Tables 4-7. Control experiments with a non-targeting gRNA utilized pSL1409 in place of pSL2084.

[0066] FIGS. 15A-15C show the genotypic analysis of human-cell RNA-guided DNA integration products. FIG. 15A is a schematic of PCR strategy used to amplify integration products from chloramphenicol-resistant E. coli transformants with pTarget containing the site-specifically inserted mini-transposon DNA that was originally encoded on pDonor. FIG. 15B is agarose gel electrophoresis of colony PCR products using the strategy shown in FIG. 15A. The lanes indicated with * show clear evidence of an amplicon around 460 bp in length, consistent with the expected amplicon size from the integrated pTarget product DNA. The lane marked “L” represents a 100 bp DNA ladder (GoldBio); lanes marked “NT” (non-targeting) used background CmR+ colonies from plasmid mixtures that were derived from HEK293T cells transfected with a non-targeting gRNA plasmid. FIG. 15C is Sanger sequencing analysis confirms the presence of a bona fide integration product, in which the mini-transposon is inserted 49-bp downstream of the 3′ edge of the target site, as depicted in the schematic aligned to the sequencing chromatograms. Comparison of sequencing products derived from both novel junctions between the pTarget and the mini-transposon (mini-Tn) clearly indicates the presence of the expected 5-bp target-site duplication (TSD), highlighted in purple. SEQ ID NO: 299, top Sanger sequence analysis, SEQ ID NO: 300, lower Sanger sequence analysis.

[0067] FIGS. 16A and 16B show that modified gRNA expression cassettes retain potent RNA-guided DNA targeting activity. FIG. 16A is schematic of an exemplary initial gRNA expression strategy (top) employing a separate plasmid encoding the gRNA as a repeat-spacer-repeat array, controlled by a human U6 promoter, and a modified pDonor plasmid (bottom) in which the CRISPR array expression cassette is placed just downstream of the mini-transposon. FIG. 16B is a graph of QCascade and TnsC-VP64 transcriptional activation using the modified gRNA expression plasmids, in which the gRNA was encoded on pDonor itself. The levels of activation, as measured by relative mCherry MFI (normalized to the non-targeting control) are nearly indistinguishable between the initial gRNA expression strategy (FIG. 16A, top) and the modified strategy in which the gRNA is encoded on pDonor (FIG. 16A, bottom). The numbers above each bar in FIG. 16B represent experimental identifiers that correspond to the information described in Table 3.

[0068] FIGS. 17A-17C show RNA Polymerase II-based expression of guide RNAs for VchINTEGRATE. FIG. 17A is schematics of different methods to express the gRNA. The CRISPR array (repeat-spacer-repeat) is canonically encoded on an RNA Pol III promoter (e.g., human U6), such that the nascent transcript stays primarily nuclear. However, it can also be encoded within the 3′-UTR of an RNA Pol II transcript, alongside the use of features such as the MALAT1 triplex to stabilize upstream protein-coding transcripts after cleavage. Cleavage occurs upon repeat-spacer-repeat processing by the Cas6 ribonuclease subunit of Cascade. FIG. 17B is schematic of the various constructs generated and tested within a pcDNA3.1-derivative expression vector. The MALAT1 triplex and CRISPR array were inserted into the 3′-UTR of either VchCas6 or VchCas7. FIG. 17C is a bar graph showing transcriptional activation data using constructs described in FIG. 17B. These results demonstrate that Pol II-encoded gRNAs are functional for RNA-guided DNA targeting and TnsC-based activation above background, defined here as the non-targeting gRNA control. The numbers above each bar in FIG. 17C represent experimental identifiers that correspond to the information described in Table 3.

[0069] FIGS. 18A-18B show TnsC-based transcriptional activation as a method to screen homologous CRISPR-Tn systems in human cells. FIG. 18A is a schematic of the transcriptional activation assay. When transfected alone, the mCherry reporter minimally expresses mCherry because it is controlled by a minimal CMV promoter. When plasmids expressing QCascade, TnsC-VP64, and a gRNA that recognizes the target present on the reporter plasmid are co-transfected, QCascade (blue oval) binds to the target sequence and recruits TnsC-VP64 (light orange ovals), leading to elevated levels of mCherry expression Three copies of TosC-VP64 are shown for simplicity to demonstrate the oligomeric nature of TnsC recruitment; the actual number of TnsC proteins that are recruited to target sites in cells may be significantly larger. FIG. 18B is a bar graph showing mCherry activation with various homologous CRISPR-Tn systems. An enlarged graph in which Tn6677 is omitted is included (right panel). Data were measured by flow cytometry, and the cellular mCherry mean fluorescence intensity (MFI) was plotted relative to the non-targeting gRNA control for each system. The numbers above each bar within panel B represent experimental identifiers that correspond to the information described in Table 9.

[0070] FIGS. 19A-19B show plasmid-to-plasmid transposition assay to reconstituted human cell RNA-guided DNA integration activity with VchINTEGRATE. FIG. 19A is a schematic of the overall strategy, in which pDonor, pTarget, and protein/gRNA expression plasmids are used to co-transfect HEK293T cells, allowing for RNA-guided DNA integration to proceed during the 48-72 growth post-transfection. HEK293T cell DNA is then harvested, and two sequential rounds of PCR are performed; “nested” primers (shown in green) are used in the second PCR to heighten sensitivity. The first round of PCR was performed with oSL5946 and oSL5169, and the second, “nested” round of PCR was performed with oSL5947 and oSLS072. FIG. 19B is agarose gel electrophoresis of PCRs performed on DNA extract from cells that were co-transfected with all necessary Tn7016 components, and either a scrambled gRNA (NT gRNA, pSL2917), or a gRNA that recognizes pTarget (T gRNA, pSL2918), are shown. The expected amplicon representing a junction sequence is marked by a green box, and was purified for additional analysis.

[0071] FIGS. 20A-20D show quantitative analysis of Tn7016 integration activity and successful truncation of transposon ends in human cells. FIG. 20A is a graph of quantitative real-time qPCR data to quantify integration efficiency for Tn7016 in HEK293T cells, using either a targeting (T) or non-targeting (NT) gRNA. Integration efficiency was calculated as a comparison of amplification of the junction amplicon compared to a segment of pTarget that would not contain a junction sequence. oSL5946 and oSL6032 were used to amplify integration events, while oSL5010 and oSL5011 were used to amplify a separate region of pTarget. FIG. 20B is a schematic showing Tn7016 transposon ends and putative TnsB binding sites Below, the lengths of DNA sequence that were cloned into pDonor plasmids, derived from the Pseudoalteromonas sp. S983 genome, is indicated. pDonor plasmid IDs used in bacterial integration assays are denoted on the left. Note that the sequence regions used to not correspond to the minimal transposon end sequences; for example, in the case of pSL2190, 250-bp starting from both ends of the Pseudoalteromonas genomic Tn7016 were used, despite encompassing the requisite features for transposase recognition plus additional sequence corresponding to the cargo of the native transposon. Subsequent designs (pSL3591, pSL3592, pSL3593) shorted the left end to 145-bp and the right end to the indicated lengths (150-bp, 75-bp, and 57-bp). FIG. 20C is a graph of bacterial transposition assays to identify active truncated variants of the right end of the Tn7016 Mini-Tn. A non-targeting (NT) negative control was included. The different length base pair (bp) descriptions define the length of the right end of Tn7016 in each experimental sample. Similarly designed pDonor plasmids, but specifically for human-cell plasmid-to-plasmid transposition assays, were subsequently designed and tested. Plasmid descriptions can be found in Table 8. FIG. 20D is quantitative real-time qPCR data to quantify integration efficiency for Tn6677 and Tn7016 in HEK293T cells. The newly designed truncated Mini-Tn for Tn7016 was used in order for the same primer pair to be used to amplify both Tn6677 and Tn7016 insertion events. Integration efficiency was calculated as a comparison of amplification of the junction amplicon compared to a segment of pTarget that would not contain a junction sequence. oSL5946 and oSL5950 were used to amplify integration events, while oSL5010 and oSL5011 were used to amplify a separate region of pTarget. The numbers above each bar within FIGS. 20A, 20C, and 20D represent experimental identifiers that correspond to the transformation/transfection information described in Table 9.

[0072] FIG. 21 is a graph of the impact of NLS placement on various components of Tn7016. Using a plasmid-to-plasmid RNA-guided DNA integration assay in human cells, the placement of bipartite nuclear localization signals (NLS) was varied on the protein components shown in the bottom of the figure; note that the TnsABf fusion protein contains an internal NLS and was not altered in any of these experiments. In the first condition on the left (19), all shown protein components contained an N-terminal NLS tag (‘N’). In subsequent experiments (20-25), the NLS tag was moved from the N-terminus to the C-terminus for the indicated protein(s). Transfections were initially performed such that each transfection contained one Tn7016 component in which the N-terminal NIS tag was repositioned to the C-terminus; a final transfection was performed (25) such that all Tn7016 components other than TnsABf possessed a C-terminal NLS tag. All integration efficiencies are normalized to a transfection in which cells were transfected with all requisite components with listed NLS locations and a targeting gRNA The numbers above each bar represent experimental identifiers that correspond to the transfection information described in Table 9.

[0073] FIGS. 22A-22E show reconstitution of protein-RNA INTEGRATE components in human cells. FIG. 22A is a schematic detailing DNA integration using RNA-guided transposases. FIG. 22B are schematics of Type I-F CRISPR-associated transposons that encode the CRISPR RNA and seven proteins for DNA integration (top). Mammalian expression vectors used for heterologous reconstitution in human cells are shown at bottom. FIG. 22C are Western blots with anti-FLAG antibody demonstrating robust protein expression upon individual (−) or multi-plasmid (+) co-transfection of HEK293T cells. Co-transfections contained all VchINT components, with the FLAG-tagged subunit(s) indicated. β-actin was used as a loading control. FIG. 22D is a schematic of eGFP knockdown assay to monitor crRNA processing by Caso in HEK293T cells. Cleavage of the CRISPR direct repeat (DR)-encoded stem-loop severs the 5′-cap from the ORF and polyA (pA) tail, leading to a loss of eGFP fluorescence (bottom). FIG. 22E is a graph of transposon-encoded VchCas6 (Type I-F3) RNA cleavage and eGFP knockdown, as measured by flow cytometry. Knockdown was comparable to PseCas6 from a canonical CRISPR-Cas system (Type I-E), was absent with a non-cognate DR substrate, and was sensitive to C-terminal tagging. To control for over-expression artifacts, data were normalized to negative control conditions (−), in which dCas9 was co-transfected with the reporter. Data are shown as mean±s.d. for n=3 biologically independent samples.

[0074] FIGS. 23A-23H show RNA-guided DNA integration in human cells using diverse CRISPR-associated transposases. FIG. 23A shows the initial detection of bona fide transposition products by colony PCR analysis, after plasmids were isolated from human cells and selected in E. coli (left). A positive amplicon selected for additional analysis is marked with a red asterisk, and Sanger confirmed the expected insertion site position and presence of target-site duplication (right). FIG. 23B is a phylogenetic tree of Type I-F3 CRISPR-associated transposon systems, with labels indicating the homologs that were tested in human cells. FIG. 23C is a comparison of plasmid-to-plasmid integration efficiencies with VchINT (Tn6677) and PseINT (Tn7016), as measured by qPCR. FIG. 23D shows amplicon sequencing reveals a strong preference for integration 49-bp downstream of the 3′ edge of the site targeted by the crRNA. FIG. 23E shows optimization of PseINT integration efficiency by varying NLS placement and plasmid stoichiometries, as measured by qPCR. Unless otherwise noted, all components contained an NLS tag on the N terminus of the protein, or internally in the case of pTnsAB_{f}. TniQ-NLS indicates a TniQ construct in which the placement of the NLS tag was changed from the N terminus to the C terminus of the protein. TnsC-NLS and TnsC-3×NLS indicate TnsC constructs in which the placement of either 1 NLS or 3 NLS tags was changed from the N terminus to the C terminus of the protein. Plasmid amounts transfected are detailed in nanograms (ng). pTniQ-NLS, pTnsC-NLS, and pTnsC-3×NLS were transfected in 100 ng amounts, unless otherwise stated. FIG. 23F is a graph of deletion experiments confirming the contribution of each protein component, a targeting crRNA, and intact transposase active site (D220N mutation in TnsB, D458N mutation in TnsAB_{f}) for successful integration. FIG. 23G is a graph of RNA-guided DNA integration with genetic payloads spanning 1-15 kb in size, transfected based on molar amount, as determined by qPCR. FIG. 23H is graph of RNA-guided DNA integration showing a strong sensitivity to mismatches across the entire 32-bp target site. Data were measured by qPCR and normalized to the perfectly matching (PM) crRNA. Data in FIG. 23D are shown as mean n=2 biologically independent samples. Data in FIGS. 23C and 23E-H are shown as mean±s.d. for n=3 biologically independent samples.

[0075] FIGS. 24A-24D show expression and nuclear localization of VchINT components. FIG. 24A is Western blotting of various VchINT components using distinct nuclear localization signals (NLS). Each component was appended with a 3×FLAG epitope tag and NLS tag, and nuclear fractionation was performed to separate nuclear and cytoplasmic cellular proteins. Histone deacetylase 1 (HDAC1) and α-Tubulin were used as nuclear- and cytoplasmic-specific loading controls, respectively. FIG. 24B are schematics of multiple exemplary fusions designs of TnsA and TnsB (TnsAB_{f}), with an NLS appended internally or at the N- or C-terminus. FIG. 24C is a graph of RNA-guided DNA integration activity determined in E. coli with the indicated TnsABt variants, as measured by qPCR. FIG. 24D is Western blotting of TnsAB_{f} with internal NLS validating expression and nuclear localization. The observed band was at the expected size, with no evidence of degradation or internal cleavage.

[0076] FIGS. 25A-25C show initial detection and optimization of targeted integration using VchINT. FIG. 25A shows nested PCR strategy to detect plasmid-transposon junctions directly from HEK293T cell lysates (left), and agarose gel electrophoresis showing target-cargo junction product bands (right). Expected amplicon sizes are marked for each PCR reaction with red arrows, and the crRNA was either non-targeting (NT) or targeting (T). “H₂O” denotes a condition in which the lysate was omitted from the PCR reactions. An aliquot of PCR is used for PCR 2 such that a “nested PCR” is performed. Sanger sequencing was performed on the product after PCR 2 in the targeting condition (bottom right, SEQ ID NO: 303). FIG. 25B is a schematic of Taqman probe strategy used to improve signal-to-noise by selectively detecting novel plasmid-transposon junctions. Probes labeled with FAM (blue) are used to detect target-transposon junctions, and probes labeled with SUN (green) are used to detect the target plasmid backbone, for integration efficiency quantification. Probes that span the junction of pTarget and the right transposon end of VchINT (SEQ ID NO: 304) are designed to anneal to an insertion event 49-bp downstream of the target site. FIG. 25C is a graph of integration efficiencies which were improved by varying the relative levels of pDonor, pTarget, or protein expression plasmids, as indicated; data were measured by qPCR and are normalized to a control sample transfected with 100 ng of each component. Data in FIG. 25C are shown as mean for n=2 biologically independent samples.

[0077] FIGS. 26A-26E show systematic screening of homologous Type I-F CRISPR-associated transposons to uncover improved systems for mammalian cell applications. FIG. 26A is a cartoon depicting the multi-tiered approach that was applied to screen the indicated systems through a series of consecutive activity assays, with associated schematics shown for each functional assay. The middle panel depicts a transcriptional activation assay designed to monitor transposon DNA binding by TnsB in human cells using a tdTomato reporter plasmid. FIG. 26B is Western blotting to detect expression of candidate Cas6 homologs in HEK293T cells, with or without human codon optimization (hCO), using anti-FLAG antibody; β-actin was used as a loading control. A range of expression levels for human codon-optimized gene variants was observed, and genes were poorly expressed for most systems when native bacterial coding sequences were used. FIG. 26C is a graph of activity assays for Cas6 homologs using the GFP knockdown assay shown in FIG. 22D. For each homolog, GFP fluorescence levels were measured by flow cytometry and normalized to the experimental condition in which the GFP reporter plasmid lacked a CRISPR direct repeat (DR) in the 5′-UTR. FIG. 26D is transcriptional activation data for TnsB-VP64 constructs from selected homologous CRISPR-associated transposons, as measured by flow cytometry. FIG. 26E is transcriptional activation data for QCascade and TnsC-VP64 from homologous CRISPR-associated transposons, as measured by flow cytometry. Tn7016, the final homolog that was selected for additional screening for transposition, is marked with a red arrow and asterisk. Data in FIGS. 26C-26E are shown as mean for n=2 biologically independent samples.

[0078] FIGS. 27A-27G show parameter screening to further improve integration activity with the PseINT (Tn7016) system. FIG. 27A is RNA-guided DNA integration efficiency for TnsAB fusion (TnsAB_{f}) protein design, with or without internal NLS, compared to the wild-type TnsA and TnsB proteins. Experiments were performed in E. coli, and efficiencies were measured by qPCR. FIG. 27B is Tn7016 transposon ends shortened relative to previously tested constructs, generating the constructs indicated with red dashed boxes at the top. RNA-guided DNA integration activity was compared for the indicated variants in E. coli, as measured by qPCR (bottom). The final pDonor design used in FIG. 23 contains 145-bp and 75-bp derived from the native left and right ends of Pseudoalteromonas Tn7016, respectively. FIG. 27C is Agarose gel electrophoresis showing successful junction products from nested PCR (top) for PseINT, and Sanger sequencing chromatograms showing the expected integration distance (bottom; SEQ ID NO: 305). FIG. 27D is integration efficiencies in HEK293T cells were similar using either typical or atypical CRISPR repeats, as measured by qPCR. FIG. 27E is RNA-guided DNA integration activity compared with the indicated BP NLS tags on PseINT components, as measured by qPCR. Individual components had their respective BP NLS tag repositioned from the N- to the C-terminus; “All” represents a condition in which all components had BP NLS tags on the noted terminus. Interestingly, the observed tag sensitivity is similar to, but distinct from, that with VchINT components. Various combinations of N- and C-terminal NLS tagging for PseQCascade and PseTnsC. NT=non-targeting crRNA. Nuclear export signal (NES) predictions for PseINT wild type (WT) and mutant TnsC. A putative NES within TnsC could lead to inefficient nuclear localization, and multiple residues were selected that, when mutated, might lower this risk. Predicted NES sequences were generated using NetNES. FIG. 27F shows RNA-guided DNA integration activity compared after appending additional NLS tags on PseTnsC and removing a potential internal nuclear export signal (NES) sequence. FIG. 27G is RNA-guided DNA integration activity compared after varying the relative levels of individual PseINT protein and RNA expression plasmids. Data were measured by qPCR and are normalized to either a control sample transfected with 100 ng of each component (left), or a control sample transfected with the standard PseINT plasmid amounts, as detailed in the Methods section (right). Data in FIGS. 27A, 27B and 27D are shown as the mean±s.d. for n=3 biologically independent samples. Data in FIGS. 27E, 27G, and 27H are shown as the mean for n=2 biologically independent samples.

[0079] FIGS. 28A-28D show selection, seeding, and sorting strategies result in further increases in PseINT integration efficiencies. FIG. 28A is normalized RNA-guided DNA integration efficiency for PseINT in the absence or presence of puromycin selection, and after harvesting cells from between 2-6 days post-transfection. Experiments used a puromycin resistance plasmid as a transfection selection marker, in addition to PseINT component plasmids, and integration activity was measured by qPCR and normalized to the condition harvested on day 3 without puromycin selection. FIG. 28B is PseINT integration efficiencies compared as a function of seeding density 24 hours before transfection. 24-well plates were with various cell densities ranging from 103 to 2×10⁵ cells per well, and integration activity was measured by qPCR. FIG. 28C is a schematic showing the use of a GFP transfection marker and cell sorting to increase integration efficiency. A GFP expression plasmid was transfected in significantly smaller amounts relative to PseINT component plasmids, and cells were sorted into bins of varying GFP expression levels. FIG. 28D show PseINT integration efficiencies are enhanced after using flow cytometry to sort cells for the brightest GFP positive cells. Cells were sorted four days after transfection, and the top 20% brightest cells were binned in increments of 5%, with Bin 1 representing the top 5% brightest cells and Bin 4 representing the 15-20% brightest cells. Integration efficiencies were determined for each bin separately, or for the unsorted population, as measured by qPCR. Integration efficiencies were normalized to the unsorted, targeting crRNA condition. Data in FIG. 28A are shown as the mean of n=2 biologically independent samples. Data in FIGS. 28B and 28D are shown as the mean+s.d. for n=3 biologically independent samples.

[0080] FIGS. 29A-29C show PseINT integration is biased towards tRL insertion and reproducibly quantified across distinct approaches. FIG. 29A shows RNA-guided DNA integration is heavily biased towards insertion in the right-left (tRL) orientation, with only a small minority of insertion events occurring in the left-right (tLR) orientation. Integration efficiencies were calculated using SYBR qPCR. FIG. 29B shows the strategy to detect and quantify integration efficiencies using PCR and next-generation sequencing. A variant pDonor was construct, in which a primer binding site is present within the transposon cargo at a distance from the transposon right end (R), such that unintegrated and integrated pTarget molecules yield amplicons of indistinguishable length using pF and pR primers (left). Consequently, next-generation sequencing of these amplicons can provide relative ‘counts’ of edited and unedited alleles in the population, without introduction of PCR bias. Agarose gel electrophoresis demonstrates identical amplicon products for non-targeting (NT) and targeting (T) samples after PCR 1 for NGS analysis (right). FIG. 29C shows calculated integration efficiencies for the same experimental samples, measured by Taqman qPCR, droplet digital PCR (ddPCR), and amplicon deep sequencing. ddPCR and qPCR analyses specifically probe for integration products that are 49-bp downstream of the target site, whereas amplicon sequencing analysis does not impose the same stringent distance bias, allowed the quantification of integration products within a larger window surrounding the anticipated integration site. Editing efficiencies for both PseINT and VchINT were consistent between different quantification methods. Data in FIG. 29A are shown as the mean±s.d. for n=3 biologically independent samples. Data in FIG. 29C are shown as the mean for n=2 biologically independent samples.

[0081] FIGS. 30A-30D show RNA-guided DNA integration at endogenous human genomic target sites. FIG. 30A is an exemplary design of amplicon sequencing assay to detect and quantify RNA-guided genomic integration. Transfected pDonor constructs contain an embedded ˜20-nt sequence identical to a genomic region (orange) downstream of a site targeted by a cognate crRNA. After transfection, a PCR reaction is performed with a single pair of primers, in which DNA sequences from both unedited and edited genomic loci can be simultaneously amplified. Next generation sequencing (NGS) is used to differentiate and quantify unedited (wild-type) and edited (integration-positive) alleles. FIG. 30B is a graph demonstrating successful integration into endogenous human genomic target sites using CRISPR-transposon systems. Control transfections delivered a non-targeting gRNA (NT), resulting in zero integration events being detected. However, when a gRNA was used to target the sequence 5′-acagtggggccactagggacaggattggtgac-3′ (SEQ ID NO: 293) within AAVS1 (denoted “T” in the graph, integration events were detected and the frequency of edited alleles relative to wild-type alleles could be quantified. FIG. 30C shows the analysis of the NGS data from experiments presented in FIG. 30B revealing the integration site distribution of detected integration events. Integration events are tallied based on the distance between the end of the 32-nucleotide target sequence and the first nucleotide of the integrated transposon end. The distance distribution is consistent with molecular determinants that have been observed from other experiments performed in human cells and bacterial cells. FIG. 30D is a graph of RNA-guided DNA integration observed at additional endogenous human genomic target sites, as revealed by amplicon sequencing. Shown are data resulting from experiments that targeted one of two target sites in AAVS1, and a third target site present in the ACTB locus.

[0082] FIG. 31 is a graph of RNA-guided DNA integration activity using modified guide CRISPR RNAs. The spacer length of CRISPR arrays was varied as shown in the x-axis, and compared with a non-targeting control crRNA that had a spacer length of 32-nt. Within this experiment, the highest integration efficiency was achieved using a spacer length of 33-nt, which is 1-nt longer than the typical spacer length (32-nt; asterisk) that is observed within CRISPR arrays for Type I-F CRISPR-transposon systems.

[0083] FIGS. 32A-32C show streamlined polycistronic expression vectors for TniQ-Cascade complex. FIG. 32A shows protein components for PseINT (e.g., derived from Tn7016) tested for their sensitivity to NLS tagging at either their N-termini (“N”) or C-termini (“C”). For bars labeled “All,” the ThiQ, Cas8, Cas7, and Cas6 components all contained the same N- or C-terminal NLS tags. For all other conditions, all components contained an N-terminal NLS tag except for the indicated protein component, which was tagged at the indicated terminus (e.g., C-terminus). The results demonstrate that C-terminal NLS tags on TiQ lead to ablation of integration activity, whereas all of the other protein components (e.g., Cas8, Cas7, and Cas6) are equally active when tagged at their C-termini with NLS tags as when they are tagged at the N-termini with NLS tags. FIG. 32B shows the investigation of polycistronic TniQ-Cascade protein expression vectors via plasmid-to-plasmid integration assays. Given the tolerance of C-terminal NLS tags across all Cascade components for PseINT (derived from Tn7016), several polycistronic vectors were constructed through the placement of NLS tags and 2A peptides, such that all protein components of the TniQ-Cascade complex will be expressed off of a single mRNA transcript. NLS tags were placed directly upstream of the 2A peptide sequences such that Cascade subunits would only have a C-terminal peptide tag. TniQ was always included as the final translated component since it does not tolerate a C-terminal tag. “Separate Vectors” represents a transfection in which all components were expressed on separate pcDNA3.1-like expression vectors driven by a CMV promoter. FIG. 32C shows the investigation of polycistronic TniQ-Cascade protein expression vectors via genomic integration assays, targeting an endogenous AAVS1 target sequence. Further investigation of polycistronic vectors expressing Cas7 at the start of the polycistronic operon revealed increased integration efficiencies when TniQ-Cascade was translated in one particular order (Cas7, Cas8, Cas6, TniQ). “Separate Vectors” represents a transfection in which all components were expressed on separate pcDNA3.1-like expression vectors driven by a CMV promoter.

[0084] FIGS. 33A-33C show additional homologous CRISPR-transposon systems for RNA-guided DNA integration. FIG. 33A is a schematic of the constructs used to screen ThiQ homologs for their function in human cells when combined with PseINT components derived from Tn7016. The vectors used in these experiments express Cascade protein components (e.g., Cas7, Cas8, and Cas6) on a polycistronic design using 2A “skipping peptides”, as well as a TnsABt fusion polypeptide, and TnsC, all from Tn7016; not shown are the pCRISPR vector encoding a Tn7016-specific crRNA, the pDonor encoding a Tn7016-specific mini-transposon, and the pTarget used for DNA integration assays. These vectors were combined with a TniQ expression vector, in which the TniQ protein was derived from either Tn7016 (e.g., PseINT) or from a variety of homologous CRISPR-transposon systems as shown in FIG. 33B. Integration efficiencies are measured using plasmid-to-plasmid transposition assays performed in human cells. FIG. 33B shows the sequence similarity of TniQ proteins from the indicated homologous CRISPR-transposon systems, which are close to Tn7016 in terms of evolutionary relatedness. The percent sequence identity at the amino acid level is shown for TiQ from several CRISPR-transposons. FIG. 33C shows RNA-guided integration activity for plasmid-to-plasmid transposition assays, which Tn7016 (e.g., PseINT) components were combined with TniQ homologs from the indicated CRISPR-transposon homolog. The Tn7016 components functioned robustly with the TniQ protein from Tn7018, Tn7019, and Tn7020, whereas the TniQ homologs from Tn7015 and Tn7014 were not able to complement the system. The ΔTniQ control condition lacked any TniQ and showed a complete loss of RNA-guided DNA integration activity, as expected.

### DETAILED DESCRIPTION

[0085] The disclosed systems, kits, and methods provide systems and methods for nucleic acid integration utilizing engineered CRISPR-transposon systems. The disclosed systems, kits, and methods provide systems and methods for RNA-guided DNA integration utilizing engineered CRISPR-transposon systems.

[0086] Provided herein are transposons derived from bacteria that, in some cases, exhibit nearly PAM-less targeting. High-throughput sequencing and transposon sequence motif analysis identified highly active systems that exhibit orthogonality in transposon DNA recognition and mobilization.

[0087] Tn7-like and Tn5053-like transposons that encode nuclease-deficient CRISPR-Cas systems, also known as CRISPR-transposons (CRISPR-Tn), catalyze the Insertion of Transposable Elements by Guide RNA-Assisted TargEting (INTEGRATE). The molecular and sequence determinants of RNA-guided DNA integration for a representative Tn7-like transposase system derived from Vibrio cholerae Tn6677, which encodes a Type I-F CRISPR-Cas system, was previously described (Klompe et al., Nature 571, 219-225 (2019)).

[0088] Provided herein are systems, kits, and methods that allow detection and optimization of INTEGRATE reactions in mammalian cells (e.g., human cells), as well as improvements to mammalian expression vectors that yield higher expression and/or improved nuclear trafficking. Also provided herein are engineered and improved InsA-TnsB fusion proteins (referred to as TnsAB_{f}), which are active for RNA-guided transposition and may be used as a substitute for separately encoded InsA and TnsB proteins. Expression vector designs, in which the guide RNA is encoded on an RNA Polymerase II promoter-controlled gene, within the 3′-untranslated region (UTR), allowing guide RNA processing and assembly of the TniQ-Cascade complex in the cytoplasm. Also provided are expression vectors encoding homologous INTEGRATE systems, as well as activity assays for components derived from these homologous INTEGRATE systems.

[0089] Section headings as used in this section and the entire disclosure herein are merely for organizational purposes and are not intended to be limiting.

### Definitions

[0090] The terms “comprise(s),” “include(s),” “having,” “has,” “can,” “contain(s),” and variants thereof, as used herein, are intended to be open-ended transitional phrases, terms, or words that do not preclude the possibility of additional acts or structures. As used herein, comprising a certain sequence or a certain SEQ ID NO usually implies that at least one copy of said sequence is present in recited peptide or polynucleotide. However, two or more copies are also contemplated. The singular forms “a,” “and” and “the” include plural references unless the context clearly dictates otherwise. The present disclosure also contemplates other embodiments “comprising,” “consisting of,” and “consisting essentially of,” the embodiments or elements presented herein, whether explicitly set forth or not.

[0091] For the recitation of numeric ranges herein, each intervening number there between with the same degree of precision is explicitly contemplated. For example, for the range of 6-9, the numbers 7 and 8 are contemplated in addition to 6 and 9, and for the range 6.0-7.0, the number 6.0, 6.1, 6.2, 6.3, 6.4, 6.5, 6.6, 6.7, 6.8, 6.9, and 7.0 are explicitly contemplated.

[0092] Unless otherwise defined herein, scientific, and technical terms used in connection with the present disclosure shall have the meanings that are commonly understood by those of ordinary skill in the art. For example, any nomenclature used in connection with, and techniques of cell and tissue culture, molecular biology, genetics and protein and nucleic acid chemistry and hybridization described herein are those that are well known and commonly used in the art. The meaning and scope of the terms should be clear; in the event, however of any latent ambiguity, definitions provided herein take precedent over any dictionary or extrinsic definition. Further, unless otherwise required by context, singular terms shall include pluralities and plural terms shall include the singular.

[0093] As used herein, “nucleic acid” or “nucleic acid sequence” refers to a polymer or oligomer of pyrimidine and/or purine bases, preferably cytosine, thymine, and uracil, and adenine and guanine, respectively (See Albert L. Lehninger, Principles of Biochemistry, at 793-800 (Worth Pub. 1982)). The present technology contemplates any deoxyribonucleotide, ribonucleotide, or peptide nucleic acid component, and any chemical variants thereof, such as methylated, hydroxymethylated, or glycosylated forms of these bases, and the like. The polymers or oligomers may be heterogenous or homogenous in composition and may be isolated from naturally occurring sources or may be artificially or synthetically produced. In addition, the nucleic acids may be DNA or RNA, or a mixture thereof, and may exist permanently or transitionally in single-stranded or double-stranded form, including homoduplex, heteroduplex, and hybrid states. In some embodiments, a nucleic acid or nucleic acid sequence comprises other kinds of nucleic acid structures such as, for instance, a DNA/RNA helix, peptide nucleic acid (PNA), morpholino nucleic acid (see, e g., Braasch and Corey, Biochemistry, 41(14): 4503-4510 (2002)) and U.S. Pat. No. 5,034,506), locked nucleic acid (LNA; see Wahlestedt et al., Proc. Natl. Acad Sci. U.S.A, 97: 5633-5638 (2000)), cyclohexenyl nucleic acids (see Wang, J. Am. Chem. Soc., 122: 8595-8602 (2000)), and/or a ribozyme. Hence, the term “nucleic acid” or “nucleic acid sequence” may also encompass a chain comprising non-natural nucleotides, modified nucleotides, and/or non-nucleotide building blocks that can exhibit the same function as natural nucleotides (e.g., “nucleotide analogs”); further, the term “nucleic acid sequence” as used herein refers to an oligonucleotide, nucleotide or polynucleotide, and fragments or portions thereof, and to DNA or RNA of genomic or synthetic origin, which may be single or double-stranded, and represent the sense or antisense strand. The terms “nucleic acid,” “polynucleotide,” “nucleotide sequence,” and “oligonucleotide” are used interchangeably. They refer to a polymeric form of nucleotides of any length, either deoxyribonucleotides or ribonucleotides, or analogs thereof.

[0094] Nucleic acid or amino acid sequence “identity,” as described herein, can be determined by comparing a nucleic acid or amino acid sequence of interest to a reference nucleic acid or amino acid sequence. The percent identity is the number of nucleotides or amino acid residues that are the same (e.g., that are identical) as between the sequence of interest and the reference sequence divided by the length of the longest sequence (e.g., the length of either the sequence of interest or the reference sequence, whichever is longer). A number of mathematical algorithms for obtaining the optimal alignment and calculating identity between two or more sequences are known and incorporated into a number of available software programs. Examples of such programs include CLUSTAL-W, T-Coffee, and ALIGN (for alignment of nucleic acid and amino acid sequences), BLAST programs (e.g., BLAST 2.1, BL2SEQ, and later versions thereof) and FASTA programs (e.g., FASTA3×, FAS™, and SSEARCH) (for sequence alignment and sequence similarity searches). Sequence alignment algorithms also are disclosed in, for example, Altschul et al., J. Molecular Biol., 215(3): 403-410 (1990), Beigert et al., Proc. Natl. Acad. Sci. USA, 106(10): 3770-3775 (2009), Durbin et al., eds., Biological Sequence Analysis: Probabilistic Models of Proteins and Nucleic Acids, Cambridge University Press, Cambridge, UK (2009), Soding, Bioinformatics, 21(7): 951-960 (2005), Altschul et al., Nucleic Acids Res., 25(17): 3389-3402 (1997), and Gusfield, Algorithms on Strings, Trees and Sequences, Cambridge University Press, Cambridge UK (1997)).

[0095] The term “homology” and “homologous” refers to a degree of identity. There may be partial homology or complete homology. A partially homologous sequence is one that is less than 100% identical to another sequence.

[0096] As used herein, the term “hybridization” is used in reference to the pairing of complementary nucleic acids. Hybridization and the strength of hybridization (e.g., the strength of the association between the nucleic acids) is influenced by such factors as the degree of complementary between the nucleic acids, stringency of the conditions involved, and the Tₘ of the formed hybrid. Hybridization methods involve the annealing of one nucleic acid to another, complementary nucleic acid, e.g., a nucleic acid having a complementary nucleotide sequence. The ability of two polymers of nucleic acid containing complementary sequences to find each other and “anneal” or “hybridize” through base pairing interaction is a well-recognized phenomenon. The initial observations of the “hybridization” process by Marmur and Lane, Proc. Natl. Acad. Sci. USA, 46: 453 (1960) and Doty et al., Proc. Natl. Acad. Sci. USA, 46: 461 (1960), have been followed by the refinement of this process into an essential tool of modern biology. For example, hybridization and washing conditions are now well known and exemplified in Sambrook et al., supra. The conditions of temperature and ionic strength determine the “stringency” of the hybridization.

[0097] As used herein, a “double-stranded nucleic acid” may be a portion of a nucleic acid, a region of a longer nucleic acid, or an entire nucleic acid. A “double-stranded nucleic acid” may be, e.g., without limitation, a double-stranded DNA, a double-stranded RNA, a double-stranded DNA/RNA hybrid, etc. A single-stranded nucleic acid having secondary structure (e.g., base-paired secondary structure) and/or higher order structure (e.g., a stem-loop structure) may also be considered a “double-stranded nucleic acid.” For example, triplex structures are considered to be “double-stranded.” In some embodiments, any base-paired nucleic acid is a “double-stranded nucleic acid.”

[0098] The term “gene” refers to a DNA sequence that comprises control and coding sequences necessary for the production of an RNA having a non-coding function (e.g., a ribosomal or transfer RNA), a polypeptide, or a precursor of any of the foregoing. The RNA or polypeptide can be encoded by a full length coding sequence or by any portion of the coding sequence so long as the desired activity or function is retained. Thus, a “gene” refers to a DNA or RNA, or portion thereof, that encodes a polypeptide or an RNA chain that has functional role to play in an organism. For the purpose of this disclosure, it may be considered that genes include regions that regulate the production of the gene product, whether or not such regulatory sequences are adjacent to coding and/or transcribed sequences. Accordingly, a gene includes, but is not necessarily limited to, promoter sequences, terminators, translational regulatory sequences such as ribosome binding sites and internal ribosome entry sites, enhancers, silencers, insulators, boundary elements, replication origins, matrix attachment sites, and locus control regions.

[0099] The terms “non-naturally occurring,” “engineered,” and “synthetic” are used interchangeably and indicate the involvement of the hand of man. The terms, when referring to nucleic acid molecules or polypeptides mean that the nucleic acid molecule or the polypeptide is at least substantially free from at least one other component with which they are naturally associated in nature and as found in nature.

[0100] A “vector” or “expression vector” is a replicon, such as plasmid, phage, virus, or cosmid, to which another DNA segment, e.g., an “insert,” may be attached or incorporated so as to bring about the replication of the attached segment in a cell.

[0101] A cell has been “genetically modified,” “transformed,” or “transfected” by exogenous DNA, e.g., a recombinant expression vector, when such DNA has been introduced inside the cell. The presence of the exogenous DNA results in permanent or transient genetic change. The transforming DNA may or may not be integrated (covalently linked) into the genome of the cell. For example, the transforming DNA may be maintained on an episomal element such as a plasmid. With respect to eukaryotic cells, a stably transformed cell is one in which the transforming DNA has become integrated into a chromosome so that it is inherited by daughter cells through chromosome replication. This stability is demonstrated by the ability of the eukaryotic cell to establish cell lines or clones that comprise a population of daughter cells containing the transforming DNA. A “clone” is a population of cells derived from a single cell or common ancestor by mitosis. A “cell line” is a clone of a primary cell that is capable of stable growth in vitro for many generations.

[0102] A “subject” or “patient” may be human or non-human and may include, for example, animal strains or species used as “model systems” for research purposes, such a mouse model as described herein. Likewise, patient may include either adults or juveniles (e.g., children). Moreover, patient may mean any living organism, preferably a mammal (e.g., human or non-human) that may benefit from the administration of compositions contemplated herein. Examples of mammals include, but are not limited to, any member of the Mammalian class: humans, non-human primates such as chimpanzees, and other apes and monkey species; farm animals such as cattle, horses, sheep, goats, swine; domestic animals such as rabbits, dogs, and cats; laboratory animals including rodents, such as rats, mice and guinea pigs, and the like. Examples of non-mammals include, but are not limited to, birds, fish, and the like. In one embodiment of the methods and compositions provided herein, the mammal is a human.

[0103] The term “contacting” as used herein refers to bring or put in contact, to be in or come into contact. The term “contact” as used herein refers to a state or condition of touching or of immediate or local proximity. Contacting a composition to a target destination, such as, but not limited to, an organ, tissue, cell, or tumor, may occur by any means of administration known to the skilled artisan.

[0104] As used herein, the terms “providing,” “administering,” and “introducing,” are used interchangeably herein and refer to the placement of the systems of the disclosure into a cell, organism, or subject by a method or route which results in at least partial localization of the system to a desired site. The systems can be administered by any appropriate route which results in delivery to a desired location in the cell, organism, or subject.

[0105] Preferred methods and materials are described below, although methods and materials similar or equivalent to those described herein can be used in practice or testing of the present disclosure. All publications, patent applications, patents and other references mentioned herein are incorporated by reference in their entirety. The materials, methods, and examples disclosed herein are illustrative only and not intended to be limiting.

### CRISPR-Tn Systems for DNA Integration

[0106] In bacteria and archaea, CRISPR/Cas systems provide immunity by incorporating fragments of invading phage, virus, and plasmid DNA into CRISPR loci and using corresponding CRISPR RNAs (“crRNAs”) to guide the degradation of homologous sequences. Transcription of a CRISPR locus produces a “pre-crRNA,” which is processed to yield crRNAs containing spacer-repeat fragments that guide effector nuclease complexes to cleave dsDNA sequences complementary to the spacer. Several different types of CRISPR systems are known, (e.g., type I, type II, or type III), and classified based on the Cas protein type and the use of a proto-spacer-adjacent motif (PAM) for selection of proto-spacers in invading DNA.

[0107] Although RNA-guided targeting typically leads to endonucleolytic cleavage of the bound substrate, recent studies have uncovered a range of noncanonical pathways in which CRISPR protein-RNA effector complexes have been naturally repurposed for alternative functions. For example, some Type I (Cascade) and Type II (Cas9) systems leverage truncated guide RNAs to achieve potent transcriptional repression without cleavage and other Type I (Cascade) and Type V (Cas12) systems lie inside unusual bacterial Tn7-like transposons and lack nuclease components altogether.

[0108] Disclosed herein are systems or kits for DNA integration into a target nucleic acid sequence comprising: an engineered Clustered Regularly Interspaced Short Palindromic Repeats (CRISPR)-CRISPR associated (Cas) transposon (CRISPR-Tn) system or one or more nucleic acids encoding the engineered CRISPR-Tn system, wherein the CRISPR-Tn system comprises at least one or both of: a) at least one Cas protein; and b) one or more transposon-associated proteins.

[0109] In some embodiments, the systems or kits may further comprise c) a guide RNA (gRNA) or a nucleic acid encoding a gRNA, wherein the gRNA is complementary to at least a portion of a target nucleic acid sequence. In some embodiments, one or more of the at least one Cas protein are part of asibonucleoprotein complex with the gRNA.

[0110] In some embodiments, the engineered CRISPR-Tn system is derived from Vibrio parahaemolyticus, Aliibrio sp., Pseudoalteromonas sp., or Endozoicomonas ascidiicola. In some embodiments, the engineered CRISPR-Tn systems are derived from Vibrio cholerae, Photobacterium iliopiscarium, Vibrio parahaemolyticus, Pseudoalteromonas sp., Pseudoalteromonas ruthenica, Photobacterium ganghwense, Shewanella sp., Vibrio diazotrophicus, Vibrio sp. 16, Vibrio sp. F12, Vibrio splendidus, Aliivibrio wodanis, Aliivibrio sp., Endozoicomonas ascidiicola, and Parashewanella spongiae.

[0111] In some embodiments, the system comprises components from different CRISPR-Tn systems. In some embodiments, one or more of the at least one Cas protein and one or more transposon-associated proteins may be derived from a homologous CRISPR-transposon system compared to the other protein components in the system. Thus, in some embodiments, one or more of the components of the engineered CRISPR-Tn system is derived from Vibrio parahaemolyticus, Alibrio sp., Pseudoalteromonas sp., or Endozoicomonas ascidiicola. In some embodiments, the engineered CRISPR-Tn systems are derived from Vibrio cholerae, Photobacterium iliopiscarium, Vibrio parahaemolyticus, Pseudoalteromonas sp., Pseudoalteromonas ruthenica, Photobacterium ganghwense, Shewanella sp., Vibrio diazotrophicus, Vibrio sp. 16, Vibrio sp. F12, Vibrio splendidus, Aliivibrio wodanis, Aliivibrio sp., Endozoicomonas ascidiicola, and Parashewanella spongiae.

[0112] In some embodiments, the system comprises two or more engineered CRISPR-To systems. Pairing of orthogonal systems with their orthogonal donor DNA substrates enables tandem insertion of multiple distinct payloads directly adjacent to each other without any risk of repressive effects from target immunity. For example, one, two, three, four, five, or more orthogonal CRISPR-Tn systems may be used to integrate large tandem arrays of payload DNA. In some embodiments, multiple orthogonal RNA-guided transposases and their transposon donor DNAs may be integrated into distal regions of a given chromosome or genome, such that the lack of sequence identity between the transposon ends of the distinct transposon DNA substrates prevents genetic instability and the risk of recombination.

[0113] The system may be a cell free system. Also disclosed is a cell comprising the system described herein. In some embodiments, the cell is a prokaryotic cell. In some embodiments, the cell is a eukaryotic cell. In some embodiments, the cell is a mammalian cell (e.g., a cell of a non-human primate or a human cell). Thus, in some embodiments, disclosed herein are systems or kits for DNA integration into a target nucleic acid sequence in a eukaryotic cell (e.g., a mammalian cell, a human cell).

a. CRISPR-Tn System

[0114] CRISPR-Cas systems are currently grouped into two classes (1-2), six types (I-VI) and dozens of subtypes, depending on the signature and accessory genes that accompany the CRISPR array. The engineered CRISPR-Tn system may be derived from a Class 1 CRISPR-Cas system or a Class 2 CRISPR-Cas system.

[0115] Type I CRISPR-Cas systems encode a multi-subunit protein-RNA complex called Cascade, which utilizes a crRNA (or guide RNA) to target double-stranded DNA during an immune response. Cascade itself has no nuclease activity, and degradation of targeted DNA is instead mediated by a trans-acting nuclease known as Cas3.

[0116] The present system may be derived from a Type I CRISPR-Cas system (such as subtypes I-B and I-F, including I-F variants. In some embodiments, the engineered CRISPR-Tn system is a Type I-F system. In some embodiments, the engineered CRISPR-Tn system is a Type I-F3 system.

[0117] In some embodiments, the engineered CRISPR-Tn system comprises Cas5, Cas6, Cas7, Cas8, or any combination thereof. In some embodiments, the engineered CRISPR-Tn system comprises Cas8-Cas5 fusion protein.

[0118] In certain embodiments, the Cas6 protein is encoded by a nucleic acid sequence having at least 70% similarity (e g., at least 70%, at least 75%, at least 80%, at least 85%, at least 90%, at least 95%, at least 98%, at least 99%) to that of SEQ ID NO: 14, SEQ ID NO: 30, SEQ ID NO: 46, or SEQ ID NO: 64. In certain embodiments, the Cas6 protein is encoded by the nucleic acid sequence of SEQ ID NO. 14, SEQ ID NO: 30, SEQ ID NO: 46, or SEQ ID NO: 64.

[0119] In certain embodiments, the Cas7 protein is encoded by a nucleic acid sequence having at least 70% similarity to that of SEQ ID NO: 12, SEQ ID NO: 28, SEQ ID NO: 44, or SEQ ID NO: 62. In certain embodiments, the Cas7 protein is encoded by a nucleic acid sequence of SEQ ID NO: 12, SEQ ID NO: 28, SEQ ID NO: 44, or SEQ ID NO: 62.

[0120] In certain embodiments, the Cas8-Cas5 fusion protein is encoded by a nucleic acid sequence having at least 70% similarity to that of SEQ ID NO: 10, SEQ ID NO: 26, SEQ ID NO: 42, or SEQ ID NO: 60. In certain embodiments, the Cas8-Cas5 fusion protein is encoded by a nucleic acid sequence of SEQ ID NO: 10, SEQ ID NO: 26, SEQ ID NO: 42, or SEQ ID NO: 60.

[0121] However, the invention is not limited to these exemplary sequences. Indeed, genetic sequences can vary between different strains, and this natural scope of allelic variation is included within the scope of the invention.

[0122] In certain embodiments, the Cas6 protein comprises an amino acid sequence having at least 70% similarity to that of SEQ ID NO: 13, SEQ ID NO: 29, SEQ ID NO: 45, or SEQ ID NO: 63. In certain embodiments, the Cas6 protein comprises the amino acid sequence of SEQ ID NO: 13, SEQ ID NO: 29, SEQ ID NO: 45, or SEQ ID NO: 63.

[0123] In certain embodiments, the Cas7 protein comprises an amino acid sequence having at least 70% similarity to that of SEQ ID NO: 11, SEQ ID NO: 27, SEQ ID NO: 43, or SEQ ID NO: 61. In certain embodiments, the Cas7 protein comprises the amino acid sequence of SEQ ID NO: 11, SEQ ID NO: 27, SEQ ID NO: 43, or SEQ ID NO: 61

[0124] In certain embodiments, the Cas8-Cas5 fusion protein comprises an amino acid sequence having at least 70% similarity to that of SEQ ID NO: 9, SEQ ID NO: 25, SEQ ID NO: 41, or SEQ ID NO: 59. In certain embodiments, the Cas8-Cas5 fusion protein comprises the amino acid sequence of SEQ ID NO: 9, SEQ ID NO: 25, SEQ ID NO: 41, or SEQ ID NO: 59.

[0125] A system of the present invention may comprise one or more transposon-associated proteins (e.g., transposases or other components of a transposon). The transposon-associated proteins may facilitate recognition or cleavage of the target nucleic acid and subsequent insertion of the donor nucleic acid into the target nucleic acid.

[0126] In some embodiments, the transposon-associated proteins are derived from a Tn7 or Tn7-like transposon. Tn7 and Tn7-like transposons may be categorized based on the presence of the hallmark DDE-like transposase gene, tnsB (also referred to as tniA), the presence of a gene encoding a protein within the AAA+ ATPase family, ms((also referred to as tniB), one or more targeting factors that define integration sites (which may include a protein within the tniQ) family, also referred to as tsD), but sometimes includes other distinct targeting factors), and inverted repeat transposon ends that typically comprise multiple binding sites thought to be specifically recognized by the TnsB transposase protein. In Tn7, the targeting factors, or “target selectors,” comprise the genes tnsD) and tnsE. Based on biochemical and genetics studies, it is known that TnsD binds a conserved attachment site in the 3′ end of the glmS gene, directing downstream integration, whereas TnsE binds the lagging strand replication fork and directs sequence-non-specific integration primarily into replicating/mobile plasmids.

[0127] The most well-studied member of this family of transposons is Tn7, hence why the broader family of transposons may be referred to as Tn7-like. “Tn7-like” term does not imply any particular evolutionary relationship between In7 and related transposons; in some cases, a Tn7-like transposon will be even more basal in the phylogenetic tree and thus Tn7 can be considered as having evolved from, or derived from, this related Tn7-like transposon.

[0128] Whereas Tn7 comprises tnsD) and msE target selectors, related transposons comprise other genes for targeting. For example, Tn5090/Tn5053 encode a member of the miQ family (a homolog of E. coli tnsD) as well as a resolvase gene miR; Tn6230 encodes the protein TnsF; and Tn6022 encodes two uncharacterized open reading frames orf2 and orf3; Tn6677 and related transposons encode variant Type I-F and Type I-B CRISPR-Cas systems that work together with TiQ for RNA-guided mobilization; and other transposons encode Type V-US CRISPR-Cas systems that work together with TniQ for random and RNA-guided mobilization. Any of the above transposon systems are compatible with the systems and methods described herein.

[0129] In some embodiments, the one or more transposon-associated proteins comprise TnsA, TnsB, TnsC, or a combination thereof. In some embodiments, the one or more transposon-associated proteins comprise TnsB and TnsC. In some embodiments, the one or more transposon-associated proteins comprise TnsA, TnsB, and TasC.

[0130] In certain embodiments, the TnsA protein is encoded by a nucleic acid sequence having at least 70% similarity (e.g., at least 70%, at least 75%, at least 80%, at least 85%, at least 90%, at least 95%, at least 98%, at least 99%) to that of SEQ ID NO: 2, SEQ ID NO: 18, SEQ ID NO: 34, or SEQ ID NO: 50. In certain embodiments, the InsA protein is encoded by the nucleic acid sequence of SEQ ID NO: 2, SEQ ID NO: 18, SEQ ID NO: 34, or SEQ ID NO: 50.

[0131] In certain embodiments, the TnsB protein is encoded by a nucleic acid sequence having at least 70% similarity to that of SEQ ID NO. 4, SEQ ID NO. 20, SEQ ID NO: 36, or SEQ ID NO: 52. In certain embodiments, the TnsB protein is encoded by a nucleic acid sequence of SEQ ID NO: 4, SEQ ID NO: 20, SEQ ID NO: 36, or SEQ ID NO: 52.

[0132] In certain embodiments, the TnsC protein is encoded by a nucleic acid sequence having at least 70% similarity to that of SEQ ID NO: 6, SEQ ID NO: 22, SEQ ID NO: 38, or SEQ ID NO: 54. In certain embodiments, the TnsC protein is encoded by a nucleic acid sequence of SEQ ID NO: 6, SEQ ID NO: 22, SEQ ID NO: 38, or SEQ ID NO: 54.

[0133] However, the invention is not limited to these exemplary sequences. Indeed, genetic sequences can vary between different strains, and this natural scope of allelic variation is included within the scope of the invention.

[0134] In certain embodiments, the TnsA protein comprises an amino acid sequence having at least 70% similarity to that of SEQ ID NO: 1, SEQ ID NO: 17, SEQ ID NO: 33, or SEQ ID NO: 49. In certain embodiments, the TnsA protein comprises the amino acid sequence of SEQ ID NO: 1, SEQ ID NO: 17, SEQ ID NO: 33, or SEQ ID NO: 49.

[0135] In certain embodiments, the TnsB protein comprises an amino acid sequence having at least 70% similarity to that of SEQ ID NO: 3, SEQ ID NO: 19, SEQ ID NO: 35, or SEQ ID NO: 51. In certain embodiments, the TnsB protein comprises the amino acid sequence of SEQ ID NO: 3, SEQ ID NO: 19, SEQ ID NO: 35, or SEQ ID NO: 51.

[0136] In certain embodiments, the TnsC protein comprises an amino acid sequence having at least 70% similarity to that of SEQ ID NO: 5, SEQ ID NO: 21, SEQ ID NO: 37, or SEQ ID NO: 53. In certain embodiments, the TnsC protein comprises the amino acid sequence of SEQ ID NO: 5, SEQ ID NO: 21, SEQ ID NO: 37, or SEQ ID NO: 53.

[0137] In some embodiments, the at least one transposon protein comprises a TnsA-TosB fusion protein. TnsA and TnsB can be fused in any orientation: N-terminus to C-terminus; C-terminus to N-terminus; N-terminus to N-terminus; or C-terminus to C-terminus, respectively. Preferably the C-terminus of TnsA is fused to the N-terminus of TnsB.

[0138] In some embodiments, the TnsA-TnsB fusion may be fused using an amino acid linker peptide of various lengths to provide greater physical separation and allow more spatial mobility between the fused portions. The linker may comprise any amino acids and may be of any length. In some embodiments, the linker may be less than about 50 (e.g., 40, 30, 20, 10, or 5) amino acid residues.

[0139] In some embodiments, the linker is a flexible linker, such that InsA and TnsB can have orientation freedom in relationship to each other. For example, a flexible linker may include amino acids having relatively small side chains, and which may be hydrophilic. Without limitation, the flexible linker may contain a stretch of glycine and/or serine residues. In some embodiments, the linker comprises at least one glycine-rich region. For example, the glycine-rich region may comprise a sequence comprising [GS]n, wherein n is an integer between 1 and 10.

[0140] In some embodiments, the linker further comprises a nuclear localization sequence (NLS). The NLS may be embedded within a linker sequence, such that it is flanked by additional amino acids. In some embodiments, the NLS is flanked on each end by at least a portion of a flexible linker. In some embodiments, the NLS is flanked on each end by a glycine rich region of the linker. Suitable nuclear localization sequences for use with the disclosed system are described further below and are applicable to use with the TnsA-TnsB fusion protein. In some embodiments, the linker comprises the amino acid sequence of

(SEQ ID NO: 86)
GCGCGKRTADGSEFESPKKKRKVGSGSGG.

[0141] In certain embodiments, the TnsA-TnsB fusion protein comprises an amino acid sequence having at least 70% (at least 75%, at least 80%, at least 85%, at least 90%, at least 95%, at least 98%, at least 99%) similarity to that of SEQ ID NOs: 94-99. For example, the TnsA-TnsB fusion protein may comprise an amino acid sequence having one or more (e.g., 1, 2, 3, 4, 5, 6, 7, 8, 9, 10, 12, 15, 18, or 20) substitutions compared to that of SEQ ID NOs: 94-99. (0142| In some embodiments, the disclosed systems further comprise TnsD, TniQ, or a combination thereof or a nucleic acid encoding TnsD, TniQ, or a combination thereof. Thus, the one or more transposon-associated proteins may comprise TnsD, TniQ, or a combination thereof.

[0142] In certain embodiments, the TnsD protein is encoded by a nucleic acid sequence having at least 70% similarity to that of SEQ ID NO: 56. In certain embodiments, the TnsD protein is encoded by a nucleic acid sequence of SEQ ID NO. 56.

[0143] In certain embodiments, the TniQ protein is encoded by a nucleic acid sequence having at least 70% similarity to that of SEQ ID NO: 8, SEQ ID NO: 24, SEQ ID NO: 40, or SEQ ID NO: 58. In certain embodiments, the TniQ protein is encoded by a nucleic acid sequence of SEQ ID NO: 8, SEQ ID NO: 24, SEQ ID NO: 40, or SEQ ID NO: 58.

[0144] In certain embodiments, the TnsD protein comprises an amino acid sequence having at least 70% similarity to that of SEQ ID NO: 55. In certain embodiments, the TnsD protein comprises the amino acid sequence of SEQ ID NO: 55.

[0145] In certain embodiments, the TniQ protein comprises an amino acid sequence having at least 70% similarity to that of SEQ ID NO: 7, SEQ ID NO: 23, SEQ ID NO: 39, or SEQ ID NO: 57. In certain embodiments, the TniQ protein comprises the amino acid sequence of SEQ ID NO: 7, SEQ ID NO: 23, SEQ ID NO: 39, or SEQ ID NO: 57.

[0146] In some embodiments, the system comprises InsA, TnsB, TnsC, TnsD and TniQ. In some embodiments, the system comprises Cas5, Cas6, Cas7, Cas8, TnsA, InsB, TnsC, and at least one or both of TnsD or TniQ. In certain embodiments, the system comprises TnsD. In certain embodiments, the system comprises TniQ. In certain embodiments, the system comprises TnsD and TniQ.

[0147] In some embodiments, any combination of the at least one Cas protein and the at least one transposon associate protein may be expressed as a single fusion protein. In some embodiments, each of the at least one Cas protein and one or more of the at least one transposon-associated protein are part of a single fusion protein in which the components are expressed as a single megapeptide.

[0148] Sequences of exemplary Cas proteins, transposon-associated proteins, gRNAs, and transposon ends can also be found in International Patent Application WO2020181264, incorporated herein by reference. However, the invention is not limited to the disclosed or referenced exemplary sequences. Indeed, genetic sequences can vary between different strains, and this natural scope of allelic variation is included within the scope of the invention.

[0149] In other embodiments, any of the proteins described or referenced herein may comprise a sequence corresponding to, or substantially corresponding to, the wild-type version of the protein. For example, the sequence may substantially correspond to the wild-type protein sequence except for changes made for facile cloning or removal of known restriction sites. Thus, protein products from potential alternative start codons compared to the predicted nucleic acid sequences in this document are therefore not excluded.

[0150] Any of the proteins described or referenced herein may comprise one or more amino acid substitutions as compared to the recited sequences. An amino acid “replacement” or “substitution” refers to the replacement of one amino acid at a given position or residue by another amino acid at the same position or residue within a polypeptide sequence. Amino acids are broadly grouped as “aromatic” or “aliphatic.” An aromatic amino acid includes an aromatic ring. Examples of “aromatic” amino acids include histidine (H or His), phenylalanine (F or Phe), tyrosine (Y or Tyr), and tryptophan (W or Trp). Non-aromatic amino acids are broadly grouped as “aliphatic.” Examples of “aliphatic” amino acids include glycine (G or Gly), alanine (A or Ala), valine (V or Val), leucine (L or Leu), isoleucine (I or He), methionine (M or Met), serine (S or Ser), threonine (T or Thr), cysteine (C or Cys), proline (P or Pro), glutamic acid (E or Glu), aspartic acid (A or Asp), asparagine (N or Asn), glutamine (Q or Gin), lysine (K or Lys), and arginine (R or Arg).

[0151] The amino acid replacement or substitution can be conservative, semi-conservative, or non-conservative. The phrase “conservative amino acid substitution” or “conservative mutation” refers to the replacement of one amino acid by another amino acid with a common property. A functional way to define common properties between individual amino acids is to analyze the normalized frequencies of amino acid changes between corresponding proteins of homologous organisms (Schulz and Schirmer, Principles of Protein Structure, Springer-Verlag, New York (1979)). According to such analyses, groups of amino acids may be defined where amino acids within a group exchange preferentially with each other, and therefore resemble each other most in their impact on the overall protein structure (Schulz and Schirmer, supra). Examples of conservative amino acid substitutions include substitutions of amino acids within the sub-groups described above, for example, lysine for arginine and vice versa such that a positive charge may be maintained, glutamic acid for aspartic acid and vice versa such that a negative charge may be maintained, serine for threonine such that a free —OH can be maintained, and glutamine for asparagine such that a free —NH₂ can be maintained. “Semi-conservative mutations” include amino acid substitutions of amino acids within the same groups listed above, but not within the same sub-group. For example, the substitution of aspartic acid for asparagine, or asparagine for lysine, involves amino acids within the same group, but different sub-groups. “Non-conservative mutations” involve amino acid substitutions between different groups, for example, lysine for tryptophan, or phenylalanine for serine, etc.

[0152] The components of the system may be present in the system in various ratios. In some embodiments, each of the protein components or the nucleic acids encoding thereof are provided in a 1:1 ratio. For example, when each protein component is encoded on a single nucleic acid, the single nucleic acid comprises a single coding sequence for each protein component.

[0153] In some embodiments, any one of the protein components may be provided in greater abundance to any other protein component. In certain embodiments, Cas7 or the nucleic acid encoding Cas7 in greater abundance compared to the remaining protein components or nucleic acids encoding thereof. For example, multiple copies of a nucleic acid encoding Cas7 may be provided for each copy of any of the other components (e.g., Cas6, Cas5, Cas8, InsA, TnsB, or TnsC). In some embodiments, Cas7 is encoded on a nucleic acid separate from any of the other components such that it can be provided in the system and methods herein at a higher abundance or dosage than the other components. Analogously, higher concentrations of the Cas7 protein can be provided in the systems and methods compared to the other proteins. In some embodiments, for every one copy of Cas6 or Cas8, or nucleic acids encoding thereof, 2 or more copies of Cas7 or a nucleic acid encoding Cas7 are included in the system. In some embodiments, for every one copy of Cas6 or Cas8 or nucleic acids encoding thereof, 5-10 copies of Cas7 or a nucleic acid encoding Cas7 are included in the system.

b. Nuclear Localization Sequence

[0154] In the systems disclosed herein, one or more of the at least one Cas protein and the at least one transposon-associated protein comprise a nuclear localization signal (NLS). The nuclear localization sequence may be appended to the one or more of the at least one Cas protein and the at least one transposon-associated protein at a N-terminus, a C-terminus, embedded in the protein (e.g., inserted internally within the open reading frame (ORF)), or a combination thereof.

[0155] In some embodiments, one or more of the at least one Cas protein and the at least one transposon-associated protein comprises two or more NLSs. The two or more NLSs may be in tandem, separated by a linker, at either end terminus of the protein, or embedded in the protein (e.g., inserted internally within the ORF instead).

[0156] In some embodiments, a NLS is fused to the C-terminus of Cas6. In some embodiments, a NLS is fused to the N-terminus, C-terminus, or both of Cas7. In certain embodiments, Cas7 comprises two NLSs fused in tandem to the N-terminus. In some embodiments, a NLS is fused to the N-terminus or C-terminus of a Cas8-Cas5 fusion protein.

[0157] In some embodiments, a NLS is fused to the C-terminus of TnsA. In some embodiments, a NLS is fused to a N-terminus of TnsB. In some embodiments, a NLS is fused to the C-terminus of TnsC.

[0158] The nuclear localization sequence may comprise any amino acid sequence known in the art to functionally tag or direct a protein for import into a cell's nucleus (e.g., for nuclear transport). Usually, a nuclear localization sequence comprises one or more positively charged amino acids, such as lysine and arginine.

[0159] In some embodiments, the NLS is a monopartite sequence. A monopartite NLS comprise a single cluster of positively charged or basic amino acids. In some embodiments, the monopartite NLS comprises a sequence of K-K/R-X-K/R, wherein X can be any amino acid. Exemplary monopartite NLS sequences include those from the SV40 large T-antigen, c-Myc, and TUS-proteins.

[0160] In some embodiments, the NLS is a bipartite sequence. Bipartite NLSs comprise two clusters of basic amino acids, separated by a spacer of about 9-12 amino acids. Exemplary bipartite NLSs include the NLS of nucleoplasmin, KR[PAATKKAGQA]KKKK (SEQ ID NO: 87), and the NLS of EGL-13, MSRRRKANPTKLSENAKKLAKEVEN (SEQ ID NO: 88). In some embodiments, the NLS comprises a bipartite SV40 NLS. In certain embodiments, the NLS comprises an amino acid sequence having at least 70% similarity to KRTADGSEFESPKKKRKV(SEQ ID NO: 89). In select embodiments, the NLS consists of an amino acid sequence of KRTADGSEFESPKKKRKV(SEQ ID NO: 89).

[0161] The protein components of the disclosed system (e.g., the Cas proteins or the transposon-associated proteins) may further comprise an epitope tag (e.g., 3×FLAG tag, an HA tag, a Myc tag, and the like). In some embodiments, the epitope tag may be adjacent, either upstream or downstream, to a nuclear localization sequence. The epitope tags may be at the N-terminus, a C-terminus, or a combination thereof of the corresponding protein.

c. gRNA

[0162] In some embodiments, the engineered CRISPR-Tn systems further comprise a gRNA complementary to at least a portion of the target nucleic acid sequence, or a nucleic acid encoding the at least one gRNA.

[0163] The gRNA may be a crRNA, crRNA/tracrRNA (or single guide RNA, sgRNA). The terms “gRNA,” “guide RNA,” “crRNA,” and “CRISPR guide sequence” may be used interchangeably throughout and refer to a nucleic acid comprising a sequence that determines the binding specificity of the CRISPR-Cas system. A gRNA hybridizes to (complementary to, partially or completely) a target nucleic acid sequence (e.g., the genome in a host cell). In some embodiments, the at least one gRNA is encoded in a CRISPR RNA (crRNA) array.

[0164] The system may further comprise a target nucleic acid. In some embodiments, target nucleic acid sequence comprises a human sequence.

[0165] The gRNA or portion thereof that hybridizes to the target nucleic acid (a target site) may be between 15-40 nucleotides in length. In some embodiments, the gRNA sequence that hybridizes to the target nucleic acid is 15, 16, 17, 18, 19, 20, 21, 22, 23, 24, 25, 26, 27, 28, 29, 30, 31, 32, 33, 34, 35, 36, 37, 38, 39, or 40 nucleotides in length. gRNAs or sgRNA(s) used in the present disclosure can be between about 5 and 100 nucleotides long, or longer (e.g., 5, 6, 7, 8, 9, 10, 11, 12, 13, 14, 15, 16, 17, 18, 19, 20, 21, 22, 23, 24, 25, 26, 27, 28, 29, 30, 31, 32, 33, 34, 35, 36, 37, 38, 39, 40, 41, 42, 43, 44, 45, 46, 47, 48, 49, 50, 51, 52, 53, 54, 55, 56, 57, 58, 59 60, 61, 62, 63, 63, 64, 65, 66, 67, 68, 69, 70, 71, 72, 73, 74, 75, 76, 77, 78, 79, 80, 81, 82, 83, 84, 85, 86, 87, 88, 89, 90, 91 92, 93, 94, 95, 96, 97, 98, 99, or 100 nucleotides in length, or longer).

[0166] To facilitate gRNA design, many computational tools have been developed (See Prykhozhij et al. (PLOS ONE, 10(3): (2015)); Zhu et al. (PLOS ONE, 9(9) (2014)); Xiao et al. (Bioinformatics. Jan 21 (2014)); Heigwer et al. (Nat Methods, 11(2): 122-123 (2014)). Methods and tools for guide RNA design are discussed by Zhu (Frontiers in Biology, 10 (4) pp 289-296 (2015)), which is incorporated by reference herein. Additionally, there are many publicly available software tools that can be used to facilitate the design of sgRNA(s); including but not limited to, Genscript Interactive CRISPR gRNA Design Tool, WU-CRISPR, and Broad Institute GPP sgRNA Designer. There are also publicly available pre-designed gRNA sequences to target many genes and locations within the genomes of many species (human, mouse, rat, zebrafish, C. elegans), including but not limited to, IDT DNA Predesigned Alt-R CRISPR-Cas9 guide RNAs, Addgene Validated gRNA Target Sequences, and GenScript Genome-wide gRNA databases.

[0167] In addition to a sequence that binds to a target nucleic acid, in some embodiments, the gRNA may also comprise a scaffold sequence (e.g., tracrRNA). In some embodiments, such a chimeric gRNA may be referred to as a single guide RNA (sgRNA). Exemplary scaffold sequences will be evident to one of skill in the art and can be found, for example, in Jinek, et al. Science (2012) 337(6096): 816-821, and Ran, et al. Nature Protocols (2013) 8:2281-2308, incorporated herein by reference in their entireties.

[0168] In some embodiments, the gRNA sequence does not comprise a scaffold sequence and a scaffold sequence is expressed as a separate transcript. In such embodiments, the gRNA sequence further comprises an additional sequence that is complementary to a portion of the scaffold sequence and functions to bind (hybridize) the scaffold sequence.

[0169] As described elsewhere herein the protein and gRNA components of the system may be expressed and transcribed from the nucleic acids using any promoter or regulatory sequences known in the art. In some embodiments, the gRNA is transcribed under control of an RNA Polymerase II promoter. In some embodiments, the gRNA is transcribed under control of an RNA Polymerase III promoter.

[0170] In some embodiments, the gRNA sequence is at least 50%, 55%, 60%, 65%, 70%, 75%, 80%, 85%, 90%, 95%, 96%, 97%, 98%, 99%, or at least 100% complementary to a target nucleic acid. In some embodiments, the gRNA sequence is at least 50%, 55%, 60%, 65%, 70%, 75%, 80%, 85%, 90%, 95%, 96%, 97%, 98%, 99%, or at least 100% complementary to the 3′ end of the target nucleic acid (e.g., the last 5, 6, 7, 8, 9, or 10 nucleotides of the 3′ end of the target nucleic acid).

[0171] The gRNA may be a non-naturally occurring gRNA.

[0172] The system may further comprise a target nucleic acid. The target nucleic acid may be flanked by a protospacer adjacent motif (PAM). A PAM site is a nucleotide sequence in proximity to a target sequence. For example, PAM may be a DNA sequence immediately following the DNA sequence targeted by the CRISPR-Tn system.

[0173] The target sequence may or may not be flanked by a protospacer adjacent motif (PAM) sequence. In certain embodiments, a nucleic acid-guided nuclease can only cleave a target sequence if an appropriate PAM is present, see, for example Doudna et al., Science, 2014, 346(6213): 1258096, incorporated herein by reference. A PAM can be 5′ or 3′ of a target sequence. A PAM can be upstream or downstream of a target sequence. In one embodiment, the target sequence is immediately flanked on the 3′ end by a PAM sequence. A PAM can be 1, 2, 3, 4, 5, 6, 7, 8, 9, 10 or more nucleotides in length. In certain embodiments, a PAM is between 2-6 nucleotides in length. The target sequence may or may not be located adjacent to a PAM sequence (e.g., PAM sequence located immediately 3′ of the target sequence) (e.g., for Type I CRISPR/Cas systems). In some embodiments, e.g., Type I systems, the PAM is on the alternate side of the protospacer (the 5′ end). Makarova et al. describes the nomenclature for all the classes, types, and subtypes of CRISPR systems (Nature Reviews Microbiology 13:722-736 (2015)). Guide structures and PAMs are described in by R. Barrangou (Genome Biol. 16:247 (2015)).

[0174] Non-limiting examples of the PAM sequences include: CC, CA, AG, GT, TA, AC, CA, GC, CG, GG, CT, TG, GA, AGG, TGG, T-rich PAMs (such as TTT, TTG, TTC, etc.), NGG, NGA, NAG, NGGNG and NNAGAAW (W=A or T, SEQ ID NO: 91), NNNNGATT (SEQ ID NO: 92), NAAR (R=A or G), NNGRR (R=A or G), NNAGAA (SEQ ID NO: 93) and NAAAAC (SEQ ID NO: 90), where N is any nucleotide. In some embodiments, the PAM may comprise a sequence of CN, in which N is any nucleotide. In select embodiments, the PAM may comprise a sequence of CC.

[0175] “Complementarity” refers to the ability of a nucleic acid to form hydrogen bond(s) with another nucleic acid sequence by either traditional Watson-Crick or other non-traditional types. A percent complementarity indicates the percentage of residues in a nucleic acid molecule, which can form hydrogen bonds (e.g., Watson-Crick base pairing) with a second nucleic acid sequence. Full complementarity is not necessarily required, provided there is sufficient complementarity to cause hybridization. There may be mismatches distal from the PAM. (0177| In some embodiments, when the system comprises TnsA, TnsB, TnsC, TnsD and TniQ binding to the target nucleic acid may be mediated through a TnsD binding site within the target nucleic acid sequence. Thus, the recognition of the target nucleic acid utilizing the systems described herein may proceed in a gRNA-dependent and/or -independent manner.

d. Donor Nucleic Acid

[0176] The system may further include a donor nucleic acid to be integrated. The donor nucleic acid may be a part of a bacterial plasmid, bacteriophage, a virus, autonomously replicating extra chromosomal DNA element, linear plasmid, linear DNA, linear covalently closed DNA, mitochondrial or other organellar DNA, chromosomal DNA, and the like. In some embodiments, the donor nucleic acid comprises a cargo nucleic acid sequence.

[0177] The donor nucleic acid may be flanked by at least one transposon end sequence. In some embodiments, the donor nucleic acid is flanked on the 5′ and the 3′ end with a transposon end sequence. The term “transposon end sequence” refers to any nucleic acid comprising a sequence capable of forming a complex with the transposase enzymes thus designating the nucleic acid between the two ends for rearrangement. Usually, these sequences contain inverted repeats and may be about 10-150 base pairs long, however the exact sequence requirements differ for the specific transposase enzymes. Transposon end sequences are well known in the art. Transposon ends sequences may or may not include additional sequences that promotes or augment transposition.

[0178] The transposon end sequences on either end may be the same or different. The transposon end sequence may be the endogenous CRISPR-transposon end sequences or may include deletions, substitutions, or insertions. The endogenous CRISPR-transposon end sequences may be truncated. In some embodiments, the transposon end sequence includes an about 40 base pair (bp) deletion relative to the endogenous CRISPR-transposon end sequence. In some embodiments, the transposon end sequence includes an about 100 base pair deletion relative to the endogenous CRISPR-transposon end sequence. The deletion may be in the form of a truncation at the distal (in relation to the cargo) end of the transposon end sequences.

[0179] In some embodiments, the transposon end sequences may comprise a 250 bp nucleic acid sequence having at least 70% similarity to that of SEQ ID NO: 15, SEQ ID NO: 16, SEQ ID NO: 31, SEQ ID NO: 32, SEQ ID NO: 47, SEQ ID NO: 48, SEQ ID NO: 65, or SEQ ID NO: 66. In some embodiments, the sequences may contain a portion of the above disclosed sequences, thereby comprising a minimal end sequence for facilitation insertion.

[0180] The donor nucleic acid, and by extension the cargo nucleic acid, may of any suitable length, including, for example, about 50-100 bp (base pairs), about 100-1000 bp, at least or about 10 bp, at least or about 20 bp, at least or about 25 bp, at least or about 30 bp, at least or about 35 bp, at least or about 40 bp, at least or about 45 bp, at least or about 50 bp, at least or about 55 bp, at least or about 60 bp, at least or about 65 bp, at least or about 70 bp, at least or about 75 bp, at least or about 80 bp, at least or about 85 bp, at least or about 90 bp, at least or about 95 bp, at least or about 100 bp, at least or about 200 bp, at least or about 300 bp, at least or about 400 bp, at least or about 500 bp, at least or about 600 bp, at least or about 700 bp, at least or about 800 bp, at least or about 900 bp, at least or about 1 kb (kilobase pair), at least or about 2 kb, at least or about 3 kb, at least or about 4 kb, at least or about 5 kb, at least or about 6 kb, at least or about 7 kb, at least or about 8 kb, at least or about 9 kb, at least or about 10 kb, or greater.

e. Nucleic Acids

[0181] The one or more nucleic acids encoding the engineered CRISPR-Tn system may be any nucleic acid including DNA, RNA, or combinations thereof. In some embodiments, the one or more nucleic acids comprise one or more messenger RNAs, one or more vectors, or any combination thereof.

[0182] The at least one Cas protein, the at least one transposon-associated protein (e.g., TnsA, TnsB, TnsC, TnsD, and TniQ), the at least one gRNA, and the donor nucleic acid may be on the same or different nucleic acids (e.g., vector(s)). In some embodiments, the at least one Cas protein and the at least one transposon associated protein (e.g., TnsA, TnsB, and TnsC) are encoded by different nucleic acids. In some embodiments, the at least one Cas protein and the at least one transposon associated protein (e.g., TnsA, TnsB, and TnsC) are encoded by a single nucleic acid. In some embodiments, the at least one gRNA is encoded by a nucleic acid different from the nucleic acid(s) encoding the at least one Cas protein and at least one transposon associated protein (e.g., TnsA, TnsB, and TnsC) In some embodiments, the at least one gRNA is encoded by a nucleic acid also encoding the at least one Cas protein, at least one transposon associated protein (e.g., TnsA, TnsB, and TnsC), or both. In some embodiments, the nucleic acid encoding the at least one Cas protein, at least one transposon associated protein (e.g., TnsA, TnsB, and TnsC), the at least one gRNA, or any combination thereof further comprises the donor nucleic acid.

[0183] In select embodiments, a single nucleic acid encodes the gRNA and at least one Cas protein. For example, in certain embodiments, a single nucleic acid encodes the gRNA and Cas6. In alternative embodiments, a single nucleic acid encodes the gRNA and Cas7.

[0184] The gRNA may be encoded anywhere in the nucleic acid encoding the at least one Cas protein. In some embodiments, the gRNA is encoded in the 3′ UTR of the Cas protein-coding gene.

[0185] The one or more nucleic acids encoding the protein components may further comprise, in the case of RNA, or encode, as in the case of DNA, a sequence capable of forming a triple helix adjacent to the sequence encoding the protein component. In some embodiments, the sequence capable of forming a triple helix is downstream of the sequence encoding the at least one Cas protein and/or the sequence encoding the at least one transposon-associated protein. In some embodiments, the sequence capable of forming a triple helix is in a 3′ untranslated region of the sequence encoding the at least one Cas protein or the sequence encoding the at least one transposon-associated protein.

[0186] A tiple helix is formed after the binding of a third strand to the major groove of a duplex nucleic acid through Hoogsteen base pairing (e.g., hydrogen bonds) while maintaining the duplex structure of two strands making the major groove. Pyrimidine-rich and purine-rich sequences (e.g., two pyrimidine tracts and one purine tract or vice versa) can form stable triplex structures as a consequence of the formation of triplets (e.g., A-U-A and C-G-C).

[0187] In some embodiments, the triple helix forming sequence comprises two uracil-rich tracts and an adenosine-rich tract, each separated by linker or loop regions. As used herein, the term “A-rich tract” refers to a strand of consecutive nucleosides in which at least 80% of the consecutive nucleosides are adenosine. Similarly, the term “U-rich motif” refers to a strand of consecutive nucleosides in which at least 80% of the consecutive nucleosides are uridine.

[0188] In some embodiments, the triple helix sequence is derived from the 3′ terminal triple helix sequences of triple helix terminators from a long non-coding RNAs (lncRNAs), e.g., metastasis-associated lung adenocarcinoma transcript 1 (MALAT1).

[0189] One or more of the at least one Cas protein and the at least one transposon-associated protein comprise a sequence of an internal ribosome entry site (IRES) or a ribosome skipping peptide. This is particularly advantageous when a single nucleic acid or vector is used to express multiple components of the system.

[0190] The ribosome skipping peptide may comprise a 2A family peptide 2A peptides are short (˜18-25 aa) peptides derived from viruses. There are four commonly used 2A peptides, P2A, T2A, E2A and F2A, that are derived from four different viruses. Any known 2A peptide sequence is suitable for use in the disclosed system.

[0191] In some embodiments, the nucleic acid encoding the at least one Cas protein, the at least one transposon-associated protein, the at least one gRNA, or any combination thereof further comprises the donor nucleic acid.

[0192] In certain embodiments, engineering the system for use in eukaryotic cells may involve codon-optimization. It will be appreciated that changing native codons to those most frequently used in mammals allows for maximum expression of the system proteins in mammalian cells (e.g., human cells). Such modified nucleic acid sequences are commonly described in the art as “codon-optimized,” or as utilizing “mammalian-preferred” or “human-preferred” codons. In some embodiments, the nucleic acid sequence is considered codon-optimized if at least about 60% (e.g., 65%, 70%, 75%, 80%, 85%, 90%, 95%, or 98%) of the codons encoded therein are mammalian preferred codons. Furthermore, in some embodiments, engineering the CRISPR-Cas system involves incorporating elements of the native CRISPR array into the disclosed system.

[0193] The present disclosure also provides for DNA segments encoding the proteins and nucleic acids disclosed herein, vectors containing these segments and cells containing the vectors. The vectors may be used to propagate the segment in an appropriate cell and/or to allow expression from the segment (e.g., an expression vector). The person of ordinary skill in the art would be aware of the various vectors available for propagation and expression of a nucleic acid sequence.

[0194] The present disclosure further provides engineered, non-naturally occurring vectors and vector systems, which can encode one or more or all of the components of the present system. The vector(s) can be introduced into a cell that is capable of expressing the polypeptide encoded thereby, including any suitable prokaryotic or eukaryotic cell.

[0195] The vectors of the present disclosure may be delivered to a eukaryotic cell in a subject. Modification of the eukaryotic cells via the present system can take place in a cell culture, where the method comprises isolating the eukaryotic cell from a subject prior to the modification. In some embodiments, the method further comprises returning said eukaryotic cell and/or cells derived therefrom to the subject.

[0196] Viral and non-viral based gene transfer methods can be used to introduce nucleic acids encoding components of the present system into cells, tissues, or a subject. Such methods can be used to administer nucleic acids encoding components of the present system to cells in culture, or in a host organism. Non-viral vector delivery systems include DNA plasmids, cosmids, RNA (e.g., a transcript of a vector described herein), a nucleic acid, and a nucleic acid complexed with a delivery vehicle. Viral vector delivery systems include DNA and RNA viruses, which have either episomal or integrated genomes after delivery to the cell. Viral vectors include, for example, retroviral, lentiviral, adenoviral, adeno-associated and herpes simplex viral vectors.

[0197] In certain embodiments, plasmids that are non-replicative, or plasmids that can be cured by high temperature may be used, such that any or all of the necessary components of the system may be removed from the cells under certain conditions. For example, this may allow for DNA integration by transforming bacteria of interest, but then being left with engineered strains that have no memory of the plasmids or vectors used for the integration.

[0198] Drug selection strategies may be adopted for positively selecting for cells that underwent DNA integration. A donor nucleic acid may contain one or more drug-selectable markers within the cargo. Then presuming that the original donor plasmid is removed, drug selection may be used to enrich for integrated clones. Colony screenings may be used to isolate clonal events.

[0199] A variety of viral constructs may be used to deliver the present system (such as one or more Cas proteins and/or Tns proteins, gRNA(s), donor DNA, etc.) to the targeted cells and/or a subject. Nonlimiting examples of such recombinant viruses include recombinant adeno-associated virus (AAV), recombinant adenoviruses, recombinant lentiviruses, recombinant retroviruses, recombinant herpes simplex viruses, recombinant poxviruses, phages, etc. The present disclosure provides vectors capable of integration in the host genome, such as retrovirus or lentivirus. See, e.g., Ausubel et al., Current Protocols in Molecular Biology, John Wiley & Sons, New York, 1989; Kay, M. A., et al., 2001 Nat. Medic. 7(1): 33-40; and Walther W. and Stein U., 2000 Drugs, 60(2): 249-71, incorporated herein by reference.

[0200] In one embodiment, a DNA segment encoding the present protein(s) is contained in a plasmid vector that allows expression of the protein(s) and subsequent isolation and purification of the protein produced by the recombinant vector. Accordingly, the proteins disclosed herein can be purified following expression, obtained by chemical synthesis, or obtained by recombinant methods.

[0201] To construct cells that express the present system, expression vectors for stable or transient expression of the present system may be constructed via conventional methods as described herein and introduced into host cells. For example, nucleic acids encoding the components of the present system may be cloned into a suitable expression vector, such as a plasmid or a viral vector in operable linkage to a suitable promoter. The selection of expression vectors/plasmids/viral vectors should be suitable for integration and replication in eukaryotic cells.

[0202] In certain embodiments, vectors of the present disclosure can drive the expression of one or more sequences in prokaryotic cells. Promoters that may be used include T7 RNA polymerase promoters, constitutive E. coli promoters, and promoters that could be broadly recognized by transcriptional machinery in a wide range of bacterial organisms. The system may be used with various bacterial hosts.

[0203] In certain embodiments, vectors of the present disclosure can drive the expression of one or more sequences in mammalian cells using a mammalian expression vector. Examples of mammalian expression vectors include pCDM8 (Seed, Nature (1987) 329:840, incorporated herein by reference) and pMT2PC (Kaufman, et al., EMBO J. (1987) 6:187, incorporated herein by reference). When used in mammalian cells, the expression vector's control functions are typically provided by one or more regulatory elements. For example, commonly used promoters are derived from polyoma, adenovirus 2, cytomegalovirus, simian virus 40, and others disclosed herein and known in the art. For other suitable expression systems for both prokaryotic and eukaryotic cells see, e.g., Chapters 16 and 17 of Sambrook, et al., MOLECULAR CLONING: A LABORATORY MANUAL. 2nd eds., Cold Spring Harbor Laboratory, Cold Spring Harbor Laboratory Press, Cold Spring Harbor, N. Y., 1989, incorporated herein by reference.

[0204] Vectors of the present disclosure can comprise any of a number of promoters known to the art, wherein the promoter is constitutive, regulatable or inducible, cell type specific, tissue-specific, or species specific. In addition to the sequence sufficient to direct transcription, a promoter sequence of the invention can also include sequences of other regulatory elements that are involved in modulating transcription (e.g., enhancers, Kozak sequences and introns). Many promoter/regulatory sequences useful for driving constitutive expression of a gene are available in the art and include, but are not limited to, for example, CMV (cytomegalovirus promoter), EFla (human elongation factor 1 alpha promoter), SV40 (simian vacuolating virus 40 promoter), PGK (mammalian phosphoglycerate kinase promoter), Ubc (human ubiquitin C promoter), human beta-actin promoter, rodent beta-actin promoter, CBb (chicken beta-actin promoter), CAG (hybrid promoter contains CMV enhancer, chicken beta actin promoter, and rabbit beta-globin splice acceptor), TRE (Tetracycline response element promoter), H1 (human polymerase III RNA promoter), U6 (human U6 small nuclear promoter), and the like. Additional promoters that can be used for expression of the components of the present system, include, without limitation, cytomegalovirus (CMV) intermediate early promoter, a viral LTR such as the Rous sarcoma virus LTR, HIV-LTR, HTLV-1 LTR, Maloney murine leukemia virus (MMLV) LTR, myeoloproliferative sarcoma virus (MPSV) LTR, spleen focus-forming virus (SFFV) LTR, the simian virus 40 (SV40) early promoter, herpes simplex tk virus promoter, elongation factor 1-alpha (EF1-α.) promoter with or without the EF1-α intron. Additional promoters include any constitutively active promoter. Alternatively, any regulatable promoter may be used, such that its expression can be modulated within a cell.

[0205] Moreover, inducible and tissue specific expression of a RNA, transmembrane proteins, or other proteins can be accomplished by placing the nucleic acid encoding such a molecule under the control of an inducible or tissue specific promoter/regulatory sequence. Examples of tissue specific or inducible promoter/regulatory sequences which are useful for this purpose include, but are not limited to, the rhodopsin promoter, the MMTV LTR inducible promoter, the SV40 late enhancer/promoter, synapsin 1 promoter, ET hepatocyte promoter, GS glutamine synthase promoter and many others. Various commercially available ubiquitous as well as tissue-specific promoters and tumor-specific are available, for example from InvivoGen. In addition, promoters which are well known in the art can be induced in response to inducing agents such as metals, glucocorticoids, tetracycline, hormones, and the like, are also contemplated for use with the invention. Thus, it will be appreciated that the present disclosure includes the use of any promoter/regulatory sequence known in the art that is capable of driving expression of the desired protein operably linked thereto.

[0206] The vectors of the present disclosure may direct expression of the nucleic acid in a particular cell type (e.g., tissue-specific regulatory elements are used to express the nucleic acid). Such regulatory elements include promoters that may be tissue specific or cell specific. The term “tissue specific” as it applies to a promoter refers to a promoter that is capable of directing selective expression of a nucleotide sequence of interest to a specific type of tissue (e.g., seeds) in the relative absence of expression of the same nucleotide sequence of interest in a different type of tissue. The term “cell type specific” as applied to a promoter refers to a promoter that is capable of directing selective expression of a nucleotide sequence of interest in a specific type of cell in the relative absence of expression of the same nucleotide sequence of interest in a different type of cell within the same tissue. The term “cell type specific” when applied to a promoter also means a promoter capable of promoting selective expression of a nucleotide sequence of interest in a region within a single tissue. Cell type specificity of a promoter may be assessed using methods well known in the art, e.g., immunohistochemical staining.

[0207] Additionally, the vector may contain, for example, some or all of the following: a selectable marker gene, such as the neomycin gene for selection of stable or transient transfectants in host cells; enhancer/promoter sequences from the immediate early gene of human CMV for high levels of transcription; transcription termination and RNA processing signals from SV40 for mRNA stability; 5′-and 3′-untranslated regions for mRNA stability and translation efficiency from highly-expressed genes like α-globin or β-globin; SV40 polyoma origins of replication and Co1E1 for proper episomal replication; internal ribosome binding sites (IRESes), versatile multiple cloning sites; T7 and SP6 RNA promoters for in vitro transcription of sense and antisense RNA; a “suicide switch” or “suicide gene” which when triggered causes cells carrying the vector to die (e.g., HSV thymidine kinase, an inducible caspase such as iCasp9), and reporter gene for assessing expression of the chimeric receptor. Suitable vectors and methods for producing vectors containing transgenes are well known and available in the art. Selectable markers also include chloramphenicol resistance, tetracycline resistance, spectinomycin resistance, streptomycin resistance, erythromycin resistance, rifampicin resistance, bleomycin resistance, thermally adapted kanamycin resistance, gentamycin resistance, hygromycin resistance, trimethoprim resistance, dihydrofolate reductase (DHFR), GPT; the URA3, HIS4, LEU2, and TRPI genes of S. cerevisiae.

[0208] When introduced into the cell, the vectors may be maintained as an autonomously replicating sequence or extrachromosomal element or may be integrated into host DNA.

[0209] In one embodiment, the donor DNA may be delivered using the same gene transfer system as used to deliver the Cas protein, and/or transposon associated proteins (included on the same vector) or may be delivered using a different delivery system In another embodiment, the donor DNA may be delivered using the same transfer system as used to deliver gRNA(s).

[0210] In one embodiment, the present disclosure comprises integration of exogenous DNA into the endogenous gene. Alternatively, an exogenous DNA is not integrated into the endogenous gene. The DNA may be packaged into an extrachromosomal or episomal vector (such as AAV vector), which persists in the nucleus in an extrachromosomal state, and offers donor-template delivery and expression without integration into the host genome. Use of extrachromosomal gene vector technologies has been discussed in detail by Wade-Martins R (Methods Mol Biol. 2011; 738:1-17, incorporated herein by reference).

[0211] The present system (e.g., proteins, polynucleotides encoding these proteins, donor polynucleotides and compositions comprising the proteins and/or polynucleotides described herein) may be delivered by any suitable means. In certain embodiments, the system is delivered in vivo. In other embodiments, the system is delivered to isolated/cultured cells (e.g., autologous iPS cells) in vitro to provide modified cells useful for in vivo delivery to patients afflicted with a disease or condition.

[0212] Vectors according to the present disclosure can be transformed, transfected, or otherwise introduced into a wide variety of cells. Transfection refers to the taking up of a vector by a cell whether or not any coding sequences are in fact expressed. Numerous methods of transfection are known to the ordinarily skilled artisan, for example, lipofectamine, calcium phosphate co-precipitation, electroporation, DEAE-dextran treatment, microinjection, viral infection, and other methods known in the art. Transduction refers to entry of a virus into the cell and expression (e.g., transcription and/or translation) of sequences delivered by the viral vector genome. In the case of a recombinant vector, “transduction” generally refers to entry of the recombinant viral vector into the cell and expression of a nucleic acid of interest delivered by the vector genome.

[0213] Any of the vectors comprising a nucleic acid sequence that encodes the components of the present system is also within the scope of the present disclosure. Such a vector may be delivered into host cells by a suitable method. Methods of delivering vectors to cells are well known in the art and may include DNA or RNA electroporation, transfection reagents such as liposomes or nanoparticles to delivery DNA or RNA; delivery of DNA, RNA, or protein by mechanical deformation (see, e.g., Sharei et al. Proc. Natl. Acad. Sci. USA (2013) 110(6): 2082-2087, incorporated herein by reference); or viral transduction. In some embodiments, the vectors are delivered to host cells by viral transduction. Nucleic acids can be delivered as part of a larger construct, such as a plasmid or viral vector, or directly, e.g., by electroporation, lipid vesicles, viral transporters, microinjection, and biolistics (high-speed particle bombardment). Similarly, the construct containing the one or more transgenes can be delivered by any method appropriate for introducing nucleic acids into a cell. In some embodiments, the construct or the nucleic acid encoding the components of the present system is a DNA molecule. In some embodiments, the nucleic acid encoding the components of the present system is a DNA vector and may be electroporated to cells. In some embodiments, the nucleic acid encoding the components of the present system is an RNA molecule, which may be electroporated to cells.

[0214] Additionally, delivery vehicles such as nanoparticle- and lipid-based mRNA or protein delivery systems can be used. Further examples of delivery vehicles include lentiviral vectors, ribonucleoprotein (RNP) complexes, lipid-based delivery system, gene gun, hydrodynamic, electroporation or nucleofection microinjection, and biolistics. Various gene delivery methods are discussed in detail by Nayerossadat et al. (Adv Biomed Res. 2012; 1: 27) and Ibraheem et al. (Int J Pharm. 2014 Jan. 1; 459(1-2):70-83), incorporated herein by reference.

[0215] Exemplary vectors encoding the systems described herein are provided in SEQ ID NOs: 67-78 and 100-292.

### Methods

[0216] Also disclosed herein are methods for nucleic acid integration utilizing the disclosed systems or kits. The methods may comprise contacting a target nucleic acid sequence with a system disclosed herein or a composition comprising the system. The descriptions and embodiments provided above for the engineered CRISPR-Tn system, the gRNA, and the donor nucleic acid are applicable to the methods described herein.

[0217] The target nucleic acid sequence may be in a cell. In some embodiments, the contacting a target nucleic acid sequence comprises introducing the system into the cell. As described above the system may be introduced into eukaryotic or prokaryotic cells by methods known in the art. In some embodiments, the cell is a mammalian cell. In some embodiments, the cell is a human cell.

[0218] In some embodiments, the target nucleic acid is a nucleic acid endogenous to a target cell. In some embodiments, the target nucleic acid is a genomic DNA sequence. The term “genomic,” as used herein, refers to a nucleic acid sequence (e.g., a gene or locus) that is located on a chromosome in a cell.

[0219] In some embodiments, the target nucleic acid encodes a gene or gene product. The term “gene product,” as used herein, refers to any biochemical product resulting from expression of a gene. Gene products may be RNA or protein. RNA gene products include non-coding RNA, such as tRNA, IRNA, micro RNA (miRNA), and small interfering RNA (siRNA), and coding RNA, such as messenger RNA (mRNA). In some embodiments, the target nucleic acid sequence encodes a protein or polypeptide.

[0220] Polynucleotides containing the target nucleic acid sequence may include, but is not limited to, purified chromosomal DNA, total cDNA, cDNA fractionated according to tissue or expression state (e.g., after heat shock or after cytokine treatment other treatment) or expression time (after any such treatment) or developmental stage, plasmid, cosmid, BAC, YAC, phage library, etc. Polynucleotides containing the target site may include DNA from organisms such as Homo sapiens, Mus domesticus, Mus spretus, Canis domesticus, Bos, Caenorhabditis elegans, Plasmodium falciparum, Plasmodium vivax, Onchocerca volvulus, Brugia malayi, Dirofilaria immitis, Leishmania, Zea maize, Arabidopsis thaliana, Glycine max, Drosophila melanogaster, Saccharomyces cerevisiae, Schizosaccharomyces pombe, Neurospora, Escherichia coli, Salmonella typhimurium, Bacillus subtilis, Neisseria gonorrhoeae, Staphylococcus aureus, Streptococcus pneumonia, Mycobacterium tuberculosis, Aquifex, Thermus aquaticus, Pyrococcus furiosus, Thermus littoralis, Methanobacterium thermoautotrophicum, Sulfolobus caldoaceticus, and others.

[0221] The method may comprise administering to the subject, in vivo, or by transplantation of ex vivo treated cells, an effective amount of the described system. In some embodiments, the vector(s) is delivered to the tissue of interest by, for example, an intramuscular, intravenous, transdermal, intranasal, oral, mucosal, or other delivery methods.

[0222] The components of the present system or ex vivo treated cells may be administered with a pharmaceutically acceptable carrier or excipient as a pharmaceutical composition. In some embodiments, the components of the present system may be mixed, individually or in any combination, with a pharmaceutically acceptable carrier to form pharmaceutical compositions, which are also within the scope of the present disclosure.

[0223] In some embodiments, an effective amount of the components of the present system or compositions as described herein can be administered. As used herein the term “effective amount” may be used interchangeably with the term “therapeutically effective amount” and refers to that quantity that is sufficient to result in a desired activity upon administration to a subject in need thereof. Within the context of the present disclosure, the term “effective amount” refers to that quantity of the components of the system such that successful DNA integration is achieved.

[0224] When utilized as a method of treatment, the effective amount may depend on the particular condition being treated, the severity of the condition, the individual patient parameters including age, physical condition, size, gender and weight, the duration of the treatment, the nature of concurrent therapy (if any), the specific route of administration and like factors within the knowledge and expertise of the health practitioner. In some embodiments, the effective amount alleviates, relieves, ameliorates, improves, reduces the symptoms, or delays the progression of any disease or disorder in the subject. In some embodiments, the subject is a human.

[0225] In the context of the present disclosure insofar as it relates to any of the disease conditions recited herein, the terms “treat,” “treatment,” and the like mean to relieve or alleviate at least one symptom associated with such condition, or to slow or reverse the progression of such condition. Within the meaning of the present disclosure, the term “treat” also denotes to arrest, delay the onset (e.g., the period prior to clinical manifestation of a disease) and/or reduce the risk of developing or worsening a disease. For example, in connection with cancer the term “treat” may mean eliminate or reduce a patient's tumor burden, or prevent, delay, or inhibit metastasis, etc.

[0226] The phrase “pharmaceutically acceptable,” as used in connection with compositions and/or cells of the present disclosure, refers to molecular entities and other ingredients of such compositions that are physiologically tolerable and do not typically produce untoward reactions when administered to a subject (e.g., a mammal, a human). Preferably, as used herein, the term “pharmaceutically acceptable” means approved by a regulatory agency of the Federal or a state government or listed in the U.S. Pharmacopeia or other generally recognized pharmacopeia for use in mammals, and more particularly in humans. “Acceptable” means that the carrier is compatible with the active ingredient of the composition (e.g., the nucleic acids, vectors, cells, or therapeutic antibodies) and does not negatively affect the subject to which the composition(s) are administered. Any of the pharmaceutical compositions and/or cells to be used in the present methods can comprise pharmaceutically acceptable carriers, excipients, or stabilizers in the form of lyophilized formations or aqueous solutions.

[0227] Pharmaceutically acceptable carriers, including buffers, are well known in the art, and may comprise phosphate, citrate, and other organic acids; antioxidants including ascorbic acid and methionine, preservatives; low molecular weight polypeptides, proteins, such as serum albumin, gelatin, or immunoglobulins; amino acids; hydrophobic polymers; monosaccharides; disaccharides, and other carbohydrates; metal complexes; and/or non-ionic surfactants. See, e.g., Remington: The Science and Practice of Pharmacy 20th Ed. (2000) Lippincott Williams and Wilkins, Ed. K. E. Hoover.

[0228] The methods may be used for a variety of purposes. For example, the methods may include, but are not limited to, inactivation of a microbial gene, RNA-guided DNA integration in a plant or animal cell, methods of treating a subject suffering from a disease or disorder (e.g., cancer, Duchenne muscular dystrophy (DMD), sickle cell disease (SCD), β-thalassemia, and hereditary tyrosinemia type I (HT1)), and methods of treating a diseased cell (e.g., a cell deficient in a gene which causes cancer).

### Kits

[0229] Also within the scope of the present disclosure are kits that include the components of the present system.

[0230] The kit may include instructions for use in any of the methods described herein. The instructions can comprise a description of administration of the present system or composition to a subject to achieve the intended effect. The instructions generally include information as to dosage, dosing schedule, and route of administration for the intended treatment. The kit may further comprise a description of selecting a subject suitable for treatment based on identifying whether the subject is in need of the treatment.

[0231] The kits provided herein are in suitable packaging. Suitable packaging includes, but is not limited to, vials, bottles, jars, flexible packaging, and the like. A kit may have a sterile access port (for example, the container may be an intravenous solution bag or a vial having a stopper pierceable by a hypodermic injection needle). The container may also have a sterile access port.

[0232] The packaging may be unit doses, bulk packages (e.g., multi-dose packages) or sub-unit doses. Instructions supplied in the kits of the disclosure are typically written instructions on a label or package insert. The label or package insert indicates that the pharmaceutical compositions are used for treating, delaying the onset, and/or alleviating a disease or disorder in a subject.

[0233] Kits optionally may provide additional components such as buffers and interpretive information. Normally, the kit comprises a container and a label or package insert(s) on or associated with the container. In some embodiment, the disclosure provides articles of manufacture comprising contents of the kits described above.

[0234] The kit may further comprise a device for holding or administering the present system or composition. The device may include an infusion device, an intravenous solution bag, a hypodermic needle, a vial, and/or a syringe.

[0235] The present disclosure also provides for kits for performing DNA integration in vitro. The kit may include the components of the present system. Optional components of the kit include one or more of the following: buffer constituents, control plasmid, sequencing primers, cells.

### EXAMPLES

[0236] The following are examples of the present invention and are not to be construed as limiting.

### Materials and Methods

[0237] Type 1-F3 CRISPR-Tn detection Protein sequences corresponding to Vibrio cholerae TnsA, TnsB, TnsC, TniQ, Cas8, Cas7, and Cas6 from the Tn6677 transposon were used as queries for PSI-BLAST (ncbi-blast-2.10.0+ release) against the nr database (version 3/27/20) using the parameters: -evalue 0.005-num_alignments 9999999-num_iterations. Unique protein IDs were extracted from each PSI-BLAST result file and used for further analysis. The genomic accession ID corresponding to each protein ID was retrieved using NCBI Efetch, and genomic IDs with hits for TniQ, Cas8, Cas7, Cas6, TnsA, TnsB, and TnsC, referred to as the Minimal Gene Set (MGS), formed an initial set of potential homologs. A genomic accession ID was scored as containing a type I-F CRISPR-Tn system if it contained PSI-BLAST hits in the following order (with no restriction on the linear distance between each PSI-BLAST hit):
[0238] 1) [TnsA, TnsB, TnsC, TniQ,Cas8,Cas7,Cas6]
[0239] 2) [TnsA, TnsB, TnsC, Cas6, Cas7, Cas8, TniQ]
[0240] 3) [TnsC,TnsB, TnsA, Cas6, Cas7,Cas8, TniQ]
[0241] 4) [Cas6, Cas7,Cas8, TniQ, TnsC, TnsB, TnsA]
[0242] 5) [TniQ,Cas8, Cas7,Cas6, TnsC, TnsB, TnsA]
[0243] 6) [Cas6, Cas7,Cas8, TniQ, TnsA, TnsB, TnsC]
[0244] 7) [TniQ,Cas8, Cas7,Cas6, TnsA, TnsB, TnsC]
[0245] 8) [TnsB, TnsA, TnsC, TniQ),Cas8, Cas7,Cas6]
[0246] 9) [Cas6, Cas7,Cas8, TniQ, TnsC, TnsA, TnsB]
[0247] 10) [TnsA, TnsB, TnsB, TnsC, TniQ,Cas8,Cas7,Cas6] (putative TnsB duplication)
[0248] 11) [Cas6,Cas7,Cas8, TniQ,TnsC,TnsB, TnsB, TnsA] (putative TnsB duplication).

[0249] Transposon end prediction To determine the transposon ends of potential homolog systems, a user-defined length of genomic sequence (default=100000) upstream and downstream of the MGS was extracted using Entrez Programming Utilities. Genomic “flanks” upstream and downstream of the MGS were then used for target site duplication (TSD)+terminal inverted repeat (TIR) detection in intergenic regions. All open reading frames (ORFs) within the genomic flanks were predicted using EMBOSS getorf (minsize=200; table=11). All genomic sequences within predicted ORFs were excluded from the TSD+TIR search. A 5′ sliding window searched between the ORFs downstream of the transposon MGS for a 5 bp TSD candidate. For every TSD candidate, a 3′ sliding window searched upstream of the transposon MGS for a matching TSD candidate. Once a pair of 5′ and 3′ TSDs was found, the 3 bps upstream and downstream of the respective repeats were checked to match a TG/AC dinucleotide motif and complementarity.

[0250] To predict TnsB binding sites within putative transposon ends, a sliding window of length 18 bp was defined downstream of a putative 5′ TSD. In order to determine repeats on the same end, a second window iterated from the first window position until the 5′ MGS coordinated (or up to 500 bp). After each iteration, the hamming distance (defined as the number of mismatches) was calculated between the first and second windows. A match was registered if the sequences had Hamming distance <=3. All positions of the second sliding window that produce matches were recorded, along with the position of the first window. Subsequently, a third sliding window iterated from the 3′ TSD until the 3′ MGS coordinate (or up to 500 bp). The first sliding window was compared to the reverse complement of the third sliding window and registered a match if the sequences had Hamming distance <=3. The reverse complement was taken because TnsB binding sites in each transposon end were oriented in opposite directions. All positions of the third sliding window that produced matches were recorded, along with the position of the first window.

[0251] The above sliding window analysis yielded the hamming distance between all possible pairs of 18-mers, 500 bp from each transposon end. These data can be represented as a hamming distance matrix. Elements in this matrix can be plotted as a series of peaks, where the x-axis represents the distance from each transposon end, and the y-axis represents the number of matches between a window at particular position and all other windows, 500 bp from each transposon end. Matches that were very close to one another were clustered (for example, if two called peaks lie 1 bp from each other, they were merged). This clustered series of peaks represented TnsB binding site positions, relative to each transposon end. The corresponding 18 bp DNA sequences were retrieved and aligned using Clustal 1.2.4. In addition, 5 bp of flanking genomic DNA sequence was added to each aligned TnsB binding site to better visualize matching bases. The alignment was then piped into MView 1.65 to generate a consensus sequence.

[0252] Manual inspection and selection of type 1-F3 CRISPR-Tn CRISPR arrays were predicted using CRISPRCasFinder 4.2.2 (Standard settings: no Cas gene detection) and were checked for the presence of a CUGCC-like stem-loop in CRISPR repeats. Conservation of active site residues in TnsA, TnsB, TnsC, TniQ, and Cas6 were checked manually.

[0253] Experimental pipeline for type I-F3 CRISPR-Tn characterization Expression vectors (pEffector) were designed where a single T7 promoter drives the expression of a CRISPR array (repeat-spacer-repeat), the native tniQ-cas8-cas7-cas6 operon, and the native tnsA-tnsB-tnsC operon from a pCDF-Duet-1 backbone. The accompanying pDonor vectors were designed to encode 250 bp Left and Right transposon end sequences on either end of a chloramphenicol resistance gene, generating a mini-Tn of 1307-bp in size, on a pUC19 backbone. Single-plasmid vectors were designed by combining the mini-Tn and the protein-RNA expression cassette onto a single plasmid.

[0254] Table 1 contains a list of CRISPR-transposon systems and includes a In ID number, a simplified name of the system based on the species from which it derives, the entire species/strain information, and an NCBI genomic accession ID that encodes the transposon.

TABLE 1
Type I-F3 CRISPR-transposons and associated
name, species, and genomic ID

| | Simple | | Genomic |
|---|---|---|---|
| Tn ID | name | Species of origin | accession ID |
| Tn7003 | Vpa | Vibrio parahaemolyticus | CP023486.1 |
| | | FORC_071 | |
| Tn7008 | Asp | Aliivibrio sp. 18157 | MAJS01000006 |
| Tn7016 | PS983 | Pseudoalteromonas sp. S983 | PNDL01000005.1 |
| Tn7017 | Eas | Endozoicomonas ascidiicola | LUTV01000003.1 |
| | | strainAVMART05 | |

[0255] Names and sequences of pDonor plasmids are described in SEQ ID NOs: 67-70. Names and sequences of pEffector plasmid are described in SEQ ID NOs: 71-74. Names and sequences of pSPIN plasmids are described in SEQ ID NOs: 75-78.

[0256] CRISPR arrays were cloned as repeat-spacer-repeat arrays and are denoted “typical” for arrays containing canonical repeats from the primary CRISPR array derived from each transposon, or “atypical” for arrays that contain atypical repeats derived from the secondary CRISPR array that encodes homing site crRNAs. Representative typical and atypical CRISPR arrays for each CRISPR-Tn system are given in Table 2, using the spacer sequence for crRNA-4, as described previously (Klompe et al., 2019, Nature 571, 219-225, incorporated herein by reference).

TABLE 2
Sequence of typical and atypical CRISPR, as repeat-spacer-repeat array

| Ta ID | Typical CRISPR array | Atypical CRISPR Array |
|---|---|---|
| Tn7003 | GTGAACTGCCGAATAGGTAGCT | TCATTACTACTAAAAAGTAGCTGA |
| | GATAATAGTACAGCGCGGCTGA | TAACAGTACAGCGCGGCTGAAATC |
| | AATCATCATTAAAGCGGTGAAC | ATCATTAAAGCGGAATACTGCCGA |
| | TGCCGAATAGGTAGCTGATAAT | ACAGGTAGGAGGCTCA (SEQ ID |
| | (SEQ ID NO: 79) | NO: 83) |
| Tn7008 | GTAACCTGCCGGATAGGCAGCC | GTAACCTGCCGGATAGGCAGCCAA |
| | AAGAATAGTACAGCGCGGCTGA | GAATAGTACAGCGCGGCTGAAATC |
| | AATCATCATTAAAGCGGTAACC | ATCATTAAAGCGCTATTATGCTGG |
| | TGCCGGATAGGCAGCCAAGAAT | AAAAGCAGTAAAACAT (SEQ ID |
| | (SEQ ID NO: 80) | NO: 84) |
| Tn7016 | GTGACCTGCCGTATAGGCAGCT | GTGACCTGCCGTATAGGCAGCTGA |
| | GAAAATAGTACAGCGCGGCTGA | AGATAGTACAGCGCGGCTGAAATC |
| | AATCATCATTAAAGCGGTGACC | ATCATTAAAGCGTAATTCTGCCGA |
| | TGCCGTATAGGCAGCTGAAAAT | AAAGGCAGTGAGTAGT (SEQ ID |
| | (SEQ ID NO: 81) | NO: 85) |
| Tn7017 | CCTCACTGCCGCATACGCAGCT | |
| | GAAAATAGTACAGCGCGGCTGA | |
| | AATCATCATTAAAGCGCCTCACT | |
| | GCCGCATACGCAGCTGAAAAT | |
| | (SEQ ID NO: 82) | |

[0257] Transposition assays All transposition experiments were performed in E. coli BL21(DE3) cells (NEB). For experiments including pDonor and pEffector, chemically competent cells carrying one of the plasmids were prepared and, after transformation of the other plasmid, transformants were isolated by selective plating on double antibiotic LB-agar plates containing IPTG. For experiments with pSPIN vectors, transformants were plated on LB-agar plates containing spectinomycin and IPTG. Transformations were done through heat shock at 42° C. for 30 see, and after recovering cells in fresh LB medium at 37° C. for 1 h, cells were plated on LB-agar plates containing the appropriate antibiotics and inducer (100 μg ml⁻¹ carbenicillin, 50 μg ml⁻¹ spectinomycin, 0.1 mM IPTG). After overnight growth at 37° C. for 18 h, hundreds of colonies were scraped from the plates, resuspended in LB medium, and prepared for subsequent analysis. Experiments performed at 25° C. were incubated for 62 h instead. Cell lysates were then prepared as described previously (Klompe et al. (2019) Nature 577, 219-225, incorporated herein by reference). Tn7017 did not yield any colonies at 37° C.; lower incubation temperature may also be affecting integration efficiency through mitigating toxicity issues. Thirty-two base pair spacer sequences were used regardless of the length of the predicted natural att-spacer.

[0258] qPCR assay to determine transposition efficiency Pairs of transposon- and target DNA-specific primers were designed to amplify fragments resulting from RNA-guided DNA integration at the expected loci in either orientation. A separate pair of genome-specific primers was designed to amplify an E. coli reference gene (rssA) for normalization purposes. qPCR reactions (10 μl) contained 5 μl of SsoAdvanced Universal SYBR Green Supermix (BioRad), 1 μl H2O, 2 μl of 2.5 μM primers, and 2 μl of tenfold diluted lysate prepared from scraped colonies, as described for the PCR analysis above. Reactions were prepared in 384-well clear/white PCR plates (BioRad), and measurements were performed on a CFX384 Real-Time PCR Detection System (BioRad) using the following thermal cycling parameters: polymerase activation and DNA denaturation (98° C. for 2.5 min), 40 cycles of amplification (98° C. for 10 s, 62° C. for 20 s), and terminal melt-curve analysis (65-95° C. in 0.5° C. per 5 s increments). Each biological sample was analyzed in three parallel reactions: one reaction contained a primer pair for the E. coli reference gene, a second reaction contained a primer pair for one of the two possible integration orientations, and a third reaction contained a primer pair for the other possible integration orientation. Transposition efficiency for each orientation was calculated as 2ΔCq, in which ΔCq is the Cq difference between the experimental reaction and the control reaction. Total transposition efficiency for a given experiment was calculated as the sum of transposition efficiencies for both orientations. All measurements presented in the text and figures were determined from three independent biological replicates.

[0259] Methods of next-generation sequencing (NGS) to profile PAM and other libraries PCR products were generated with Q5 Hot Start High-Fidelity DNA Polymerase (NEB) from extracted genomic DNA (as described by the Wizard® Genomic DNA Purification Kit), miniprepped plasmid samples, or 20-fold diluted PCR1 samples. Reactions contained 200 μM dNTPs and 0.5 μM primers and were generally subjected to 20 or 10 thermal cycles (PCR1 and PCR2, respectively) with an annealing temperature of 65° C. Primer pairs contained one target-specific primer and one transposon-specific primer (output library), two pTarget-specific primers (PAM input library), or one pDonor backbone-specific primer and one transposon-specific primer (pDonor input library). PCR amplicons were resolved by 1-2% agarose gel electrophoresis and visualized by staining with SYBR Safe (Thermo Scientific), DNA was isolated by Gel Extraction Kit (Qiagen), and NGS libraries were quantified by qPCR using the NEBNext Library Quant Kit (NEB). Illumina sequencing was performed using a NextSeq mid or high output kit with 150-cycle reads and automated demultiplexing and adaptor trimming (Illumina).

[0260] PAM library experiments To determine the PAM preference for RNA-guided DNA-integration, the following steps were performed using custom Python scripts. First, reads were filtered based on the requirement that they contain 10 bp of perfectly matching transposon end sequence (in the case of the output library) as well as a perfect 32 bp target site. The five bases immediately upstream of the target site were then extracted, and enrichment values were calculated as:

((reads PAM output)/(total output reads))/((reads PAM input)/(total input reads)).

[0261] To determine the integration site preference from the same PAM library dataset reads were extracted from the output library that resulted from a ‘CC’ PAM sequence. These reads were then subjected to the illumina pipeline script as previously described (Vo et al., Nat Biotechnol 39, 480-489 (2021), incorporated herein by reference) that extracts a 17-bp fingerprint from the integration site, maps it back to the targeted sequence, and outputs plots of number of reads found per base position relative to the 3′ end of the target site.

[0262] pDonor library experiments A pDonor library encoding twenty different mini-Tn was generated and prepared for NGS as described above 1.5 μl of pDonor library was transformed with chemically competent E. coli BL21(DE3) cells containing a pEffector and plated on LB agar containing 100 μg ml⁻¹ carbenicillin, 50 μg ml⁻¹ spectinomycin, and 0.1 mM IPTG. After 18 hours, cells were scraped and resuspended in 500 μl of LB. An equivalent of 500 μl of OD7.0 was aliquoted for each sample and the gDNA was purified using a Promega Wizard Genomic DNA purification kit and used for NGS sample preparation as described above. Primer pairs contained one genome-specific primer and one cargo-specific primer and were varied such that both tRL and tLR integration orientations could be detected downstream of the target site.

[0263] Reads from the output libraries (the amplicons that result from integration at target-4) were filtered based on a perfect 20 bp sequence match to the target locus, and the presence of specific 15-bp mini-Tn ends was tallied. This was done for tRL integration only, but for both the left- and right-end boundaries. Reads for the input libraries (the amplicons resulting from the pDonor pooled library) were filtered based on a 45 bp sequence (25 bp transposon-end+20 bp flanking sequence) or 25 bp sequence (20 bp flanking+5 bp TSD) for the left- and right-end amplicons respectively, and the number of occurrences for each mini-Tn homolog were tallied. Enrichment values were then calculated as:

((reads mini-Tn output)/(total output reads))/((reads mini-Tn input)/(total input reads)).

[0264] Sequence and Phylogenetic Analyses CRISPR-Tn systems were clustered based on TnsB phylogeny as follows. Bioinformatic analysis resulted in 304 unique TnsB protein IDs that were found in genomic sequences together with all other required CRISPR-Tn protein components. This set was filtered for <90% sequence identity using CD-HIT with default settings. To generate a known outgroup for phylogenetic analysis, BLASTp was run with EcoTnsB (from Tn7) as a query, and 5 homologous sequences were extracted (HAW0448631.1, WP_000267723.1, EGT3574482.1, WP_126892736.1, and WP_087529690.1). TnsB protein sequences were then aligned in geneious using the MUSCLE plugin (default settings and allowing for 10 iterations), and the resulting alignment was used to generate a phylogenetic tree using the FastTree plugin (default settings). The EcoTnsB-derived sequences indeed formed a distinct clade and were used to root the tree, which was done using iTOL for downstream visualization purposes. Nodes with a bootstrap value <0.7 were removed, and clades were colored based on a branch length of 1.23.

[0265] Phylogenetic analyses of TniQ psiBLAST results were performed as follows. Protein sequences corresponding to TnsD/TniQ from Tn7, Tn6677, and Tn7017 (WP_001243518.1, WP_000479715.1, and WP_067516660.1+WP_157673483.1, respectively) were used as queries for PSI-BLAST (ncbi-blast-2.10.0+release) against the nr database (version 02/04/2021) using the parameters: -evalue 0.005-num_alignments 9999999-num_iterations 10. Unique protein IDs were extracted, combined, and filtered for <90% sequence identity using CD-HIT with default settings and protein lengths were plotted. To reduce the number of protein sequences for downstream analysis unique protein IDs were extracted, combined, and filtered for <50% sequence identity using CD-HIT with default settings. Because of the large number of homologs, and the large spread in protein sizes, only sequences 370-675 AA in size were included in downstream analysis. This list of 3,585 sequences was complemented with TnsD sequences identified in different studies: I-B1-TnsD (AvCAST-TnsD, WP_011320212.1); I-B2-TnsD (PmcCAST-TnsD, WP_094348672.1), 1-F3-TnsD (RLV60497.1, WP_170308330.1), and additional TnsD sequences from Tn7 to create an outgroup. The first 180 AA were extracted to solely compare the TniQ (pfam xxx) domain. Protein sequences were aligned in geneious using the MUSCLE plugin (default settings, 2 iterations), from which a phylogenetic tree was generated using the FastTree plugin (default settings).

[0266] Smaller scale analysis was performed with selected TnsD/TniQ protein sequences: twenty type I-F3, two type I-B, and three type V-K CRISPR-Tn. Additionally, two predicted type 1-F3 systems and the flagship Tn7-TnsD were included. Sequences were aligned in geneious using the MUSCLE algorithm with default settings and allowing for 8 iterations. The sequence identity matrix was exported and visualized in Prism. FastTree was then used with default settings to generate a phylogenetic tree, which was uploaded to iTOL for visualization purposes. The three type V-K systems were used as an outgroup to root the tree.

[0267] Cargo analyses of CRISPR-Tn systems were performed as follows. Pfam identifiers were assigned for annotated genes within each full length transposon, and manually compared to lists of pfams predicted to be associated with bacterial defense systems.

[0268] Experimental results presented herein and described in accompanying figures employed a large set of variable gRNA and protein expression vectors, as well as, in some cases, donor DNA and target DNA vectors. Results presented in bar graphs and elsewhere are accompanied by an experimental numeric ID (see FIG. 11, for an example), which is linked with information provided in Table 3, for Examples 5-11. This table provides a key describing the vectors (aka plasmids) that were used, for the same experimental numeric ID. Descriptions of the Plasmids usedin Examples 5-11 are in Tables 4-7. Results presented in Example 12 are accompanied by an experimental numeric ID, which is linked with information provided in Table 8 and descriptions of the Plasmids are in Table 9. Results presented in Example 13 are linked with information provided in Table 10.

### Example 1

[0269] Identification and characterization of active Type I-F3 CRISPR-Tn systems

[0270] To explore the natural mechanistic variance among CRISPR-Tn, a bioinformatic pipeline was established to identify and prioritize Type I-F3 CRISPR-Tn systems for experimental analysis. Briefly, V. cholerae protein components from Tn6677 were used as a query and iterative rounds of psiBLAST were performed to assemble homolog sets, genomic contigs encoding all protein components were extracted, and left and right transposon boundaries were identified based on their characteristic structure. Enzymatic active sites and CRISPR arrays were manually inspected for a subset of candidate systems, and systems from a range of gammaproteobacterial species whose TnsB transposase proteins are well distributed across a number of clearly distinguishable clades were selected. Species and naming information for each CRISPR-Tn are given in Table 1.

[0271] For each system, a donor plasmid (pDonor) was synthesized and cloned encoding the mini-Tn, alongside an effector plasmid (pEffector) that encodes a crRNA and 6-8 protein components. Sequences of these plasmids are given in SEQ ID NO: 67-74. Transposition was assayed in E. coli BL21(DE3) cells using a crRNA targeting lacZ, and integration events in either of two possible orientations were quantified using qPCR (FIG. 1C). The majority of systems were functional at 37° C., albeit with a range of activities, with one catalyzing targeted integration at near 100% efficiency without selection for the insertion event (FIG. 1D). Since many systems derive from species that grow at lower temperatures, the transposition assays were repeated at 25° C. and activity was greatly improved for Tn7017 (FIGS. 1E and 5A). Bidirectional integration was analyzed, finding that most favored one orientation product, with some showing a >10³: 1 preference (FIG. 5B).

[0272] In addition to their standard CRISPR arrays, both I-F3 and V-K CRISPR-Tn systems encode atypical CRISPR RNAs that direct homing to specific genomic attachment sites and are characterized by unusual repeats and spacers. In some cases, these atypical crRNAs are differentially regulated, or direct enhanced integration activity when compared to typical crRNAs. The atypical CRISPR arrays for each of the disclosed systems were tested for integration efficiency at the same target site using these atypical repeats with fully matching spacer sequences (FIGS. 5C-5F). Sequences for representative typical and atypical CRISPR arrays were each system, with a crRNA-4 spacer sequence, are given in Table 2.

### Example 2

[0273] RNA-guided transposition with I-F3 systems exhibits flexible PAM requirements

[0274] Canonical DNA-targeting CRISPR-Cas systems rely on specific recognition of protospacer adjacent motifs (PAMs) for efficient binding and cleavage, and thereby avoid any accidental and lethal self-targeting of the CRISPR array. The PAM requirements of disclosed system were analyzed using a library approach, in which a fully randomized 5-bp sequence is cloned directly adjacent to the target site (FIG. 2A); junction PCR and deep sequencing then allows for selective amplification of successful integration products and comparison of enriched PAM motifs to the starting input library.

[0275] Interestingly, PAM enrichment scores were narrowly distributed and failed to reveal a strongly enriched or depleted group of sequence motifs (FIGS. 2B and 6A). A PAM motif for I-F3 systems was unable to be assessed using standard enrichment thresholds applied for other CRISPR-Cas effectors, and instead sequences found within the top and bottom 5% enriched sequences were analyzed. PAMs enriched in the upper 5% exhibited a clear ‘CN’ preference. Integration events for all CRISPR-Tn homologs occurred 48-52 nts downstream of the target site for substrates bearing a ‘CC’ PAM (FIGS. 2D and 6D). PAM sequences found in the lower 5% exhibited a ‘AN’ motif, which bears similarity to the ‘self’ sequence adjacent to the spacer sequence within these transposon-encoded CRISPR arrays (‘AC’ in most cases) (FIG. 6C). The presence of ‘self” PAMs in the output library suggested that transposition should be able to occur downstream of the CRISPR array itself, albeit at lower efficiency.

[0276] To validate these PAM library results, the integration efficiency of Tn7016 was measured for individual ‘CN’ and ‘NC’ PAMs within the same target plasmid context (FIG. 2D). These data revealed that plasmids with any CN PAM could be indistinguishably targeted for transposition, in excellent agreement with the library results. Tn7016 exhibited nearly PAM-less activity, with only a modest 2-fold decrease in activity at the ‘AC’ PAM.

[0277] Stringent PAM recognition is thought to accelerate the target search process, as is required during phage infections, rapid targeting kinetics during transposition is less likely to be selected for, whereas more permissive PAM recognition is well-suited to systems and organisms with evolutionary pressures. Flexible PAM recognition largely eliminates target site restrictions and may benefit genome engineering applications, analogously to recently engineered Cas9 variants that exhibit near PAM-less editing activity (See, Gasiunas et al., (2020) Nat Commun 17, 5512).

### Example 3

### Distinct TniQ Proteins Provide a Homing Pathway for Diverged CRISPR-Tn

[0278] Tn7017 from an Endozoicomonas ascidiicola isolate, unusually included the presence of two distinct tniQ family genes (FIG. 3A). One gene is within the same operon as cas8-cas7-cas6 and encodes a TniQ protein with 397 amino acids, similar to other known TniQ proteins, whereas the other homolog is encoded on its own operon downstream of the CRISPR array and is much larger, 630 aa. Tn7017 may encode two distinct homing pathways that rely on alternative TniQ family proteins: an RNA-dependent pathway that exploits EasTniQ-Cascade for RNA-guided DNA target binding to promote horizontal transmission, and an RNA-independent pathway that exploits EasTnsD for sequence-specific DNA attachment site targeting to promote vertical transmission. Phylogenetic analysis revealed that EasTniQ was more closely related to TniQ proteins involved with RNA-guided transposition (FIG. 3B), while Eas-TnsD showed little sequence homology to TniQs from other RNA-guided CRISPR-Tn. Tn7017 was the only CRISPR-Tn system in the set that lacked an identifiable CRISPR array that could explain the insertion of Tn7017 downstream of the highly conserved parE gene (FIG. 5C).

[0279] A target plasmid (pTarget) with the 3′ end of the E. ascidiicola parE gene, which contains the anticipated EasTnsD binding site, was generated and transposition to pTarget (RNA-independent) and a genomic target site (RNA-dependent) was monitored in parallel (FIG. 3C). Transposition was indeed directed to both target sites, with the insertion site downstream of parE recapitulating the native genomic location of Tn7017. Gene deletions showed that integration into pTarget required EasTnsD but proceeded independently of Cascade, demonstrating that TnsABCD constitutes an independent targeting pathway directed at the parE safe harbor locus. In contrast, EasTniQ was necessary for the RNA-guided transposition pathway but functioned only when combined with Cascade. Interestingly, RNA-guided transposition efficiency at the genomic target increased drastically when EasTosD was omitted, whether or not pTarget was present (FIG. 3C), suggesting that EasTnsD may somehow inhibit TniQ-Cascade formation or compete for binding downstream transposase components.

[0280] Collectively, these data provide evidence of a type I-F3 CRISPR-Tn system that leverages two ThiQ-family proteins for distinct targeting pathways.

### Example 4

### CRISPR-Tn Systems are Orthogonal

[0281] Pooled library transposition assays were performed, in which pEffector plasmids were reacted with 20 pDonor substrates in a single transformation step (FIG. 4A). Successful integration products were then deep sequenced, and comparison to the starting library yielded enrichment scores describing the relative activity between each mini-Tn and the protein components from a given CRISPR-Tn system.

[0282] Pooled library transposition results revealed hotspots of integration activity, with most effectors acting upon only a narrow range of mini-Tn substrates. Intriguingly, Tn7017 could not be acted upon by any pEffector in the collection, aside from their cognate pairing, which in this case were not tested because experiments were performed at 37° C.′ and not the more optimal 25° C. As expected, the RNA-guided transposase machinery was most active on its own cognate transposon ends.

[0283] Orthogonal CRISPR-Tn systems allow for genomic target sites to be efficiently retargeted for the generation of tandem DNA insertions, without any repressive target immunity-like effect. E. coli Tn7 has been shown to prevent multiple insertions at the same target site through the action of TnsB and TnsC (Stellwagen and Craig, 1997). The integration efficiency of orthogonal CRISPR-Tn systems in E. coli strains that either lacked any pre-existing transposon or contained a mini-transposon derived from Tn6677 downstream of the same site being targeted by the orthogonal system were compared. Unlike the target immunity data with Tn6677, where the efficiency of a second insertion was close to 0%, orthogonal CRISPR-Tn systems generated a second insertion with the same efficiency, regardless of the presence of mini-Tn6677 (FIG. 4B). Transposase-transposon DNA sequence specificity dictated both transposition activity and target immunity effects, thus providing a straightforward opportunity to leverage multiple orthogonal CRISPR-Tn systems for high-efficiency genomic DNA integration in a given bacterial strain without spatial restrictions.

### Example 5

### CRISPR-Tn Systems for Mammalian Expression

[0284] A set of CRISPR-Tn systems that encode nuclease-deficient type I-F CRISPR-Cas systems and catalyze robust RNA-guided DNA integration activity in E. coli are outlined in FIG. 9, with the species and strain from which they derive, a numbering system, a numeric Tn#identifier for the native transposon from which the molecular components derive, and a unique ID for labeling purposes. Using these systems, alongside the system encoded by the transposon Tn6677 found in Vibrio cholerae strain HE-45, mammalian expression vectors were generated for the various components (Tables 4-7).

### Example 6

### Guide RNA Processing Activity by Cas6 in Human Cells

[0285] A panel of expression vectors were generated for the Cas6 subunit of type I-F Cascade (previously known as Csy4), in which the gene was placed downstream of a human cytomegalovirus (CMV) promoter within the backbone of a pcDNA3.1-derivative vector (FIGS. 10A-10B). Similar expression vectors were generated for Cas6 homologs derived from the additional CRISPR-Tn systems outlined in FIG. 9, and expression vectors encoding either Cas6 using the original gene sequence from the bacterial genomic source (e.g., with native codon usage), or a human codon-optimized gene sequence in which codon optimization was applied for human cell expression were generated. In additional embodiments, nuclear localization signals (NLS) are appended to either the N-terminus of Cas6, the C-terminus of Cas6, or both termini of Cas6 (Table 4).

[0286] Cas6, and/or other components, were expressed heterologously in human cells using standard methods. In a typical human cell transfection, approximately 50,000 HEK293T cells (maintained in DMEM media with 10% heat-inactivated FBS and penicillin-streptomycin) were seeded per well in a 24-well tissue culture plate coated with Poly-D-Lysine, 24 hours prior to transfection. The following day, cells were transfected with the desired plasmid(s) and Lipofectamine 2000 (Thermo Fisher) per the manufacturer's instructions. A transfection mix typically has approximately 1 μg of total DNA, with all transfection mixes in a given experiment containing equivalent mass amounts of total plasmid DNA; pUC19 may be used to normalize plasmid amounts, as needed. If analysis via flow cytometry will be performed, a fluorescent expression plasmid was included, which may be BFP, GFP, or mCherry, depending on the assay. This fluorescent plasmid was included as a transfection marker, such that flow-cytometry based gating for transfected cells can be performed before further analysis Cells were cultured at 37° C. with 5% CO₂, the media was replaced approximately 24 hours after transfection, and cells are harvested for analysis 48-72 hours post-transfection.

[0287] To test for and optimize Cas6 expression in human cells, HEK293T cells were transfected with various Cas6 expression vectors containing a 3×FLAG tag, cultured cells for 48-72 hours post-transfection, harvested the cell lysate, and used Western Blotting with anti-FLAG antibodies to assess Cas6 expression; anti-beta-actin antibodies are used as loading controls. Representative expression data are shown in FIG. 10B, indicating that native codon usage results in low expression levels across homologs, and codon optimization generates robust Cas6 expression.

[0288] Cas6 is a subunit of type I-F Cascade and is known to be a ribonuclease that binds to a stem-loop sequence encoded by the CRISPR repeat and cleaves at the base of the stem, this processing activity generates a mature form of CRISPR RNA (crRNA), or guide RNA, from a precursor form in which the spacer (guide) region is flanked by two copies of the repeat (Sternberg et al., RNA 18, 661-672 (2012)). In order to test for Cas6 ribonuclease activity in human cells, a GFP repression assay was developed, in which Cas6 activity can be directly monitored via a decrease or loss of GFP expression. Starting with a mammalian GFP reporter plasmid, a single copy of the full-length 28-bp CRISPR repeat (derived from the Tn6677-encoded CRISPR array) was introduced into the 5′-untranslated region (UTR), upstream of the GFP start codon but downstream of the transcription start site. Upon transcription, the mRNA will contain a stem-loop within the 5′-UTR recognized by Caso, and upon cleavage, the downstream coding sequence (CDS) for GFP is severed from the 5′-cap structure, leading to rapid degradation of the transcript and loss of GFP expression and fluorescence (FIGS. 11A-11B).

[0289] Starting with a representative Cas6 homolog derived from a canonical Type I-F1 CRISPR-Cas system from Pseudomonas aeruginosa (hereafter also referred to as “Pae”), transfection of HEK293T cells with both the Cas6 expression plasmid and GFP reporter plasmid yielded a significant decrease in GFP mean fluorescence intensity (MFI), as shown in FIGS. 11C-11D.

[0290] Cas6 derived from V. cholerae HE-45 Tn6677 (VchINTEGRATE) was tested and transfection with both the Vch Cas6 expression plasmid and the GFP reporter plasmid containing a Vch-derived CRISPR repeat yielded a significant decrease in GFP MFI compared to HEK293T cells transfected with only the GFP reporter plasmid (FIG. 11C). Placement of C-terminal motifs (e.g., NLS and/or 2A motifs) dramatically reduced the observed GFP repression, as shown in FIG. 11D.

[0291] Additional Cas6 homologs derived from homologous CRISPR-Tn systems were tested using a similar approach, wherein the VchINTEGRATE CRISPR repeat upstream of the GFP reporter gene was replaced with the CRISPR repeat sequence derived from the associated transposon-encoded CRISPR array (Table 4). Using the same flow cytometry assay and analysis, Cas6 variants with codon optimization, which also contained an SV40NLS-3×FLAG sequence appended to the N-terminus, exhibited a range of GFP repression activity (FIG. 11E). Thus, Cas6 homologs encoded by type I-F CRISPR-Tn systems were active for CRISPR repeat cleavage and gRNA processing in human cells.

### Example 7

### Transposon DNA Binding Activity by TnsB

[0292] TnsB is a transposase within the DDE retroviral integrase family of enzymes, which catalyzes the transesterification reaction upon integration of the transposon DNA into its target site during transposition. TnsB is also a sequence-specific DNA binding protein that recognizes conserved binding sites present on both ends of Tn7- and Tn5053-like transposons, often referred to as left (L) and right (R) ends. These TnsB binding sites are present in multiple copies on both ends, and are similar but not identical in sequence to each other. Previous studies suggest that formation of a paired-end complex between both transposon ends on the donor DNA molecule, as well as interactions with the targeting machinery on the target DNA molecule, trigger both the nuclease activity of TnsB, which leads to cleavage at the 3′ ends of both strands of transposon DNA, as well as the transesterification activity of TnsB that catalyzes attack of the liberated 3′-hydroxyl ends of the transposon DNA on the phosphate groups of the target DNA. However, in the absence of all of these molecular cues, TnsB still exhibits high-affinity binding to the TnsB binding sites on the transposon ends.

[0293] A fluorescence-based mammalian reporter assay was developed in HEK293T cells to study sequence-specific binding of TnsB to its cognate binding sites in mammalian cells. A tdTomato reporter gene was cloned downstream of a minimal CMV promoter, such that the basal expression level of tdTomato was low. When cells were co-transfected with this reporter plasmid and a plasmid encoding a nuclease-dead version of S. pyogenes Cas9 (e.g., dCas9) fused to a transcriptional activation domain, such as VP64, together with a plasmid encoding a guide RNA targeting a DNA sequence immediately upstream of the minimal CMV promoter, the localized transcriptional activation domain led to a potent increase in RNA Polymerase II recruitment and tdTomato transcription. This synthetic transcriptional activation resulted in a quantifiable increase in the tdTomato fluorescence intensity of transfected cells, which is quantified by flow cytometry.

[0294] This approach was adapted to monitor TnsB binding by cloning a panel of transposon end substrates derived from Tn6677 (VchINTEGRATE) directly upstream of the minimal CMV promoter on the reporter plasmid, and by cloning a similar VP64 transcriptional activation domain onto the C-terminus of VchInsB (FIGS. 12B-12C; see plasmids in Table 5). A variety of different reporter plasmid constructs were tested, including transposon right end constructs that were inserted in opposite orientations (Fwd and Rev) relative to the minimal CMV promoter. When HEK293T cells were co-transfected with the modified reporter plasmid and the TnsB-VP64 activator plasmid, a robust increase in cellular tdTomato fluorescence was observed, which was strongest for reporter plasmids in which the transposon end was oriented such that the 8-base pair (bp) terminal end was distal to the minimal CMV promoter (FIGS. 12C-12D). In control experiments, this transcriptional activation activity was lost when the transposon end substrate was replaced with a non-targeting sequence, such that no TnsB binding was expected to occur (FIG. 12D).

[0295] Additional TnsB homologs derived from CRISPR-Tn systems were tested using a similar approach with transposon end sequences derived from the associated homologous transposon system. Using the same flow cytometry assay and analysis, TnsB variants exhibited a range of tdTomato activation activity, demonstrating that CRISPR-Tn systems encode TnsB proteins with variable DNA binding activity in mammalian cell applications (FIG. 12E).

### Example 8

### TnsA-TnsB Fusion Protein for RNA-Guided DNA Integration

[0296] Two of the type I-F CRISPR-Tn systems shown in FIG. 1 encode natural fusion polypeptides between the endonuclease-family TnsA protein and the DDE transposase-family TnsB protein: Tn7007 derived from Aliivibrio wodanis strain 06/09/160 and Tn7009 derived from Parashewanella spongiae strain HJ039. These CRISPR-Tn systems are active for RNA-guided DNA integration in an E. coli host, and based on these natural fusion polypeptides, a functional engineered fusion of TnsA-TnsB derived from Tn6677 from V. cholerae strain HE-45 was designed (FIG. 13A; Vo et al., bioRxiv 1-17 (2021), doi: 10,1101/2021.02.11.430876). This fusion polypeptide, referred to as TnsAB, maintained wild-type RNA-guided DNA integration activity in E. coli, as compared to experiments in which TnsA and TnsB were separately expressed.

[0297] In order to leverage TnsABf in mammalian cells for nuclear integration activity, in one embodiment, a nuclear localization signal may be appended to the fusion protein in order to promote nuclear trafficking. In the context of separate expression of TnsA and TnsB, TnsA and TnsB activity were previously shown to be sensitive to terminal NLS tagging. Specifically, when modified variants of VchINTEGRATE were tested in E. coli for genomic RNA-guided DNA integration, either an N-terminal NLS on TnsA, or a C-terminal NLS on TnsB, led to severe reductions in integration efficiency, as compared to their untagged counterparts (FIG. 13B).

[0298] A bacterial expression plasmid encoding InsABf with an internal bipartite NLS tag inserted directly in frame with both TnsA and TnsB, in the region in between the native polypeptide sequences, was engineered. In addition, short glycine-serine linkers were also inserted in front of, and behind, the BP-NLS tag. The design is schematized in FIG. 13C, and plasmid descriptions are found in Table 5. The internal NLS tag not only did not adversely impact integration activity, but that it in fact increased total integration efficiency relative to the positive control containing separately encoded TnsA and TnsB (FIG. 13D).

[0299] A mammalian expression vector encoding a similarly designed TnsAB_{f} polypeptide but with human codon-optimized gene sequences was designed. An N-terminal epitope tag was added and cells were transfected with the TnsABf expression plasmid. Western blotting confirmed that the TnsAB_{f} fusion polypeptide was highly expressed, successfully trafficked to the nucleus, and persisted in its full-length form, indicating an absence of detectable degradation or proteolysis of the fusion polypeptide (FIG. 13E). To confirm that the TnsABt polypeptide was functional for transposon end binding, similar tdTomato activation assays, as described previously, were employed using a VP64-TnsABf construct, and tdTomato was activated in a TnsB binding site-dependent fashion (FIG. 13F).

### Example 9

### RNA-Guided DNA Integration in Human Cells Using Vch INTEGRATE

[0300] A plasmid-based transposition assay was adapted in order to reconstitute RNA-guided DNA integration in human cells (FIG. 14A) by using the modified expression vectors mentioned elsewhere herein. The assay comprised co-transfection of all of the necessary protein expression vectors (TniQ, Cas8, Cas7, Cas6, TosC, and TnsABf), a vector encoding gRNA, a donor DNA vector (pDonor), and a target DNA vector (pTarget). If cut-and-paste transposition occurred within the transfected cells, a new plasmid in which the mini-transposon present on pDonor is integrated into the pTarget plasmid, downstream of the 32-bp target site complementary to the gRNA sequence would result. Plasmid DNA was isolated from the transfected human cells after 48-72 hours of growth post-transfection and used to transform E. coli; successful transposition events were identified based on the characteristic antibiotic resistance genes present on the backbone and within the mini-transposon donor DNA substrate itself, as described further below. Alternatively to this phenotypic assay, the isolated plasmids may be tested directly for the presence of integrated pTarget product, based on unique and characteristic junction PCR products specific to the expected transposition product. In control experiments, the gRNA sequence was replaced with a non-targeting (scrambled) control; and/or the pTarget plasmid may also be modified to eliminate the target site; and/or one or more expression vectors may be omitted from the transfection mix.

[0301] A pDonor variant was cloned onto the non-replicative R6K origin, which can be maintained in a pir+ strain of E. coli, but which fails to replicate and stably transform most standard laboratory E. coli cloning strains. The pDonor encoded a kanamycin resistance gene (KanR) on the backbone, as well as a promoter-driven chloramphenicol resistance gene (CmR) within the mini-transposon itself. The target plasmid contained the same mCherry expression vector, with a gRNA-target site pairing that led to highly efficient TniQ-Cascade and TnsC-based transcriptional activation. pTarget also encoded a standard KanR gene on the backbone, and the remaining protein and gRNA expression plasmids encoded a standard ampicillin resistance gene (AmpR) on the backbone. The plasmid mixture obtained from transfected human cells—which contained unreacted pDonor and pTarget, as well as integrated pTarget product DNA—was isolated, commercial NEB 10-beta E. coli electrocompetent cells were transformed, and the cells were plated on LB-agar plates containing either chloramphenicol alone (25 μg/mL) or both chloramphenicol (25 μg/mL) and kanamycin (50 μg/mL). Because pDonor cannot replicate in 10-beta E. coli cells, due to the R6K backbone, the primary source of kanamycin-and chloramphenicol-resistant colonies were cells that were transformed with pTarget (KanR) which also received the mini-transposon encoding CmR. The overall strategy is outlined in FIGS. 14A-14B.

[0302] HEK293T cells were transfected with the plasmid mixtures shown in FIG. 14C using Lipofectamine 2000 and standard protocols. Cells were cultured at 37° C. with 5% CO₂, the media was replaced approximately 24 hours after transfection, and cells were harvested for analysis 48-72 hours post-transfection. The transfected plasmids were purified using the Qiagen Miniprep kit per the manufacturer's instructions, and further concentrated using the Qiagen MinElute column. Of this final purified plasmid mixture, 1 μl was used to electroporate NEB 10-beta electrocompetent E. coli cells (NEB) per the manufacturer's instructions. After recovery at 37° C., cells were plated onto LB-agar plates containing chloramphenicol. Chloramphenicol-resistant colonies were then replated onto new LB-agar plates containing both chloramphenicol and kanamycin. Chloramphenicol and kanamycin-resistant colonies were then harvested for genotypic analyses.

[0303] A low level of background CmR+ colonies were observed in experiments using a non-targeting gRNA, which were negative for donor DNA integration events. However, two biological replicates of transfection experiments using a targeting gRNA matching pTarget, after plasmid isolation and E. coli transformation, yielded an increased number of CmR+ colonies. Analytical PCR on biological material isolated from these colonies was completed using a primer pair in which one primer was specific to a region within the mini-transposon itself, and a second primer was specific to a constant region within the pTarget backbone, proximal to the anticipated integration site (FIG. 15A). PCR reactions were performed using NEB OneTaq DNA Polymerase, and reactions were analyzed by agarose gel electrophoresis. Three distinct colonies across the two biological replicates yielded robust amplicons, with DNA bands migrating at the expected size (˜460 bp) for the anticipated junction PCR product (FIGS. 15A-15B). One of the colonies that produced a junction PCR product amplicon underwent Sanger sequencing analysis with primers that would read across both junctions within pTarget. The resulting sequencing chromatograms clearly revealed the presence of bona fide integration products, in which the mini-Tn was present 49-bp downstream of the 3′ edge of the target site (FIG. 15C) Furthermore, when comparing sequencing information on both junctions, a precise duplication of 5-bp was found, in line with the 5-bp target-site duplication (TSD) generated by transposition events with Tn7-like transposons (FIG. 15C).

### Example 10

### Alternative Guide RNA Expression Vectors for RNA-Guided DNA Integration

[0304] Canonical approaches for exploiting CRISPR-Cas systems for genome editing, including the vast majority of CRISPR-Cas9 methods, encode the guide RNA downstream of an RNA Polymerase III U6 promoter. Within the context of CRISPR-Tn systems such as VchINTEGRATE, expression of the guide RNA on a separate plasmid separate from the mini-transposon donor DNA leads to a risk of self-targeting, as previously described (Vo et al., Nature Biotechnology 39, 480-489 (2021)). Self-targeting could reduce the efficiency of the overall system by inactivating a select pool of expression vectors, and could also lead to undesirable integration events. In order to avoid this, a new donor DNA plasmid (pDonor) was designed that encodes the guide RNA downstream of an RNA Polymerase III U6 promoter immediately adjacent to the mini-transposon donor itself (FIG. 16A). This approach leverages the natural mechanism of target immunity to ‘privilege’ the CRISPR array and prevent self-targeting, leading to proper RNA-guided DNA integration at the intended genomic target site. To verify that this strategy could be similarly adopted in mammalian cells, gRNA function was tested in the context of transcriptional activation assays relying on TnsC—BP-VP64 fusion proteins (FIG. 16B). Targeting gRNA encoded on pDonor led to nearly indistinguishable levels of transcriptional activation, as the exact same gRNA encoded on its own plasmid separate from pDonor.

[0305] Vectors were designed in which both a VchINTEGRATE protein component and guide RNA were encoded as a type of polycistronic construct on the same RNA molecule, controlled by an RNA Pol II promoter. This strategy reduced the number of separate plasmids required for transfection in order to reconstitute the full INTEGRATE system, and it also promoted cytoplasmic TniQ-Cascade complex formation by exporting the gRNA to the cytoplasm where protein components are initially expressed and localized, prior to nuclear trafficking (FIG. 17A). Cytoplasmic assembly of TniQ-Cascade also obviated the need to place NLS tags on every single protein subunit, since a select few NLS tags on the multi-subunit TniQ-Cascade complex would be sufficient for the entire complex to efficiently traffic to the nucleus. A 110-bp fragment from the MALAT1 locus, previously shown to stabilize mRNA transcripts lacking a PolyA tail (Nissim et al., Mol Cell 54, 698-710 (2014)), was designed and encoded downstream of a gene of interest, in between the stop codon and the CRISPR array. In this context, the CRISPR array was found within the 3′-UTR. Cas6 processing of the pre-crRNA leads to cleavage of the fusion mRNA-crRNA species, but the triplex structure protects the protein-coding mRNA from 3′ exonuclease-based degradation once the poly(A) tag has been severed from the rest of the transcript. Two constructs were designed, in which the MALAT1 triplex sequence and CRISPR array were encoded within the 3′ UTR of either a BP NLS-tagged Cas6 or Cas7, and the ability of these modified gRNA expression cassettes to function for RNA-guided DNA targeting and synthetic transcriptional activation was measured using TnsC—BP-VP64 activators (FIG. 17B). These alternative gRNA expression contexts were functional for transcriptional activation, albeit with slightly reduced efficiency as compared to a separate plasmid encoding the gRNA on a Pol III transcript (FIG. 17C). The CRISPR array may be placed within other 3′-UTRs, such as drug resistance of fluorescence reporter protein genes, and the protein machinery may be further modified in order to optimize the formation of TniQ-Cascade in the cytoplasm.

### Example 11

### Cas7 as Mediator of Efficiency

[0306] To test if modifying the relative concentrations of each plasmid that is co-transfected for TnsC-based transcriptional activation may further improve RNA-guided targeting, and subsequent integration, various ratios of components were tested in a transcriptional activation assay. Various permutations of Cas7, including multiple tandem BP NLS tags, and/or combinations of NLS tags and 3×FLAG epitope tags were tested and transcriptional activation activity was substantially increased when only Cas7 was switched from an SV40 NLS to a BP NLS, and that a 2×BP-NLS tag slightly increased transcriptional activation. In contrast, the addition of more BP-NLS tags led to a decrease of transcriptional activation.

[0307] The relative concentration of a Cas7 expression plasmid was increased compared to all other components, and a dose-dependent increase in activation was seen using a similar transcriptional activation assay. Increases in the relative concentration of other subunits resulted in limited increases in transcriptional activation, and in some cases a reduction in transcriptional activation.

TABLE 3
Table of plasmids used for the transformation
and transfection experiments

| Expt. | Type of | |
|---|---|---|
| ID | experiment | Plasmid(s) Used |
| 1 | Transfection | pSL1657, pSL2278 |
| 2 | Transfection | pSL1657, pSL2278, pSL2281 |
| 3 | Transfection | pSL1657, pSL2277, pSL2069 |
| 4 | Transfection | pSL1657, pSL2277, pSL1490 |
| 5 | Transfection | pSL1657, pSL2277, pSL2067 |
| 6 | Transfection | pSL1657, pSL2277, pSL2307 |
| 7 | Transfection | pSL1657, pSL2277, pSL1198 |
| 8 | Transfection | pSL1657, pSL2277, pSL2283 |
| 9 | Transfection | pSL1657, pSL2278, pSL1061 |
| 10 | Transfection | pSL1657, pSL2278, pSL2311 |
| 11 | Transfection | pSL1657, pSL2277, pSL2067 |
| 12 | Transfection | pSL1657, pSL2327, pSL2508 |
| 13 | Transfection | pSL1657, pSL2328, pSL2509 |
| 14 | Transfection | pSL1657, pSL2329, pSL2510 |
| 15 | Transfection | pSL1657, pSL2330, pSL2511 |
| 16 | Transfection | pSL1657, pSL2331, pSL2512 |
| 17 | Transfection | pSL1657, pSL2335, pSL2513 |
| 18 | Transfection | pSL1657, pSL2333, pSL2514 |
| 19 | Transfection | pSL1657, pSL2334, pSL2515 |
| 20 | Transfection | pSL1657, pSL2335, pSL2516 |
| 21 | Transfection | pSL1657, pSL2336, pSL2517 |
| 22 | Transfection | pSL1657, pSL2337, pSL2518 |
| 23 | Transfection | pSL1657, pSL2448, pSL2519 |
| 24 | Transfection | pSL1657, pSL2392, pSL2520 |
| 25 | Transfection | pSL1657, pSL2393, pSL2521 |
| 26 | Transfection | pSL1657, pSL2449, pSL2522 |
| 27 | Transfection | pSL0303, pSL2621, pSL2533 |
| 28 | Transfection | pSL0303, pSL2679, pSL2533 |
| 29 | Transfection | pSL2550, pSL2621, pSL2533 |
| 30 | Transfection | pSL2550, pSL2679, pSL2533 |
| 31 | Transfection | pSL2561, pSL2621, pSL2533 |
| 32 | Transfection | pSL2561, pSL2679, pSL2533 |
| 33 | Transfection | pSL2561, pSL2621, pSL2533 |
| 34 | Transfection | pSL2561, pSL2679, pSL2533 |
| 35 | Transfection | pSL2792, pSL2802, pSL2533 |
| 36 | Transfection | pSL2793, pSL2803, pSL2533 |
| 37 | Transfection | pSL2794, pSL2804, pSL2533 |
| 38 | Transfection | pSL2797, pSL2808, pSL2533 |
| 39 | Transfection | pSL2798, pSL2809, pSL2533 |
| 40 | Transfection | pSL2800, pSL2810, pSL2533 |
| 41 | Transfection | pSL2801, pSL2811, pSL2533 |
| 42 | Transformation | pSL0527, pSL0828, pSL0283 |
| 43 | Transformation | pSL0527, pSL0828, pSL1054 |
| 44 | Transformation | pSL0527, pSL0828, pSL1055 |
| 45 | Transformation | pSL0527, pSL0828, pSL1482 |
| 46 | Transformation | pSL0527, pSL0828, pSL0283 |
| 47 | Transformation | pSL0527, pSL0828, pSL1738 |
| 48 | Transformation | pSL0527, pSL0828, pSL2096 |
| 49 | Transformation | pSL0527, pSL0828, pSL2097 |
| 50 | Transformation | pSL0527, pSL0828, pSL2542 |
| 51 | Transfection | pSL2561, pSL2621, pSL2533 |
| 52 | Transfection | pSL2561, pSL2679, pSL2533 |
| 53 | Transfection | pSL2561, pSL2825, pSL2533 |
| 111 | Transfection | pSL0302, pSL0341, pSL2620, pSL2621, |
| | | pSL2622, pSL2623, pSL2783, pSL1409 |
| 112 | Transfection | pSL0302, pSL0341, pSL2620, pSL2621, |
| | | pSL2622, pSL2623, pSL2783, pSL2084 |
| 113 | Transfection | pSL0302, pSL0341, pSL2620, pSL2621, |
| | | pSL2622, pSL2623, pSL2783, pSL2945 |
| 114 | Transfection | pSL2533, pSL0341, pSL2620, pSL2621, |
| | | pSL2622, pSL2623, pSL2783, pSL1409 |
| 115 | Transfection | pSL2533, pSL0341, pSL2620, pSL2621, |
| | | pSL2622, pSL2623, pSL2783, pSL2084 |
| 116 | Transfection | pSL2533, pSL0341, pSL2620, pSL2621, |
| | | pSL2622, pSL2869, pSL2783 |
| 117 | Transfection | pSL2533, pSL0341, pSL2620, pSL2621, |
| | | pSL2871, pSL2623, pSL2783 |

TABLE 4
Description of plasmids for Cas6 expression
and activity assays in mammalian cells

| Plasmid | |
|---|---|
| ID | Plasmid name |
| pSL2333 | pcDNA5/FRT-DR-eGFP-D2PEST-NLS Homologue 9 |
| pSL2334 | pcDNA5/FRT-DR-eGFP-D2PEST-NLS Homologue 10 |
| pSL2335 | pcDNA5/FRT-DR-eGFP-D2PEST-NLS Homologue 12 |
| pSL2336 | pcDNA5/FRT-DR-eGFP-D2PEST-NLS Homologue 13 |
| pSL2337 | pcDNA5/FRT-DR-eGFP-D2PEST-NLS Homologue 14 |
| pSL2392 | pcDNA5/FRT-DR-eGFP-D2PEST-NLS Homologue 17 |
| pSL2393 | pcDNA5/FRT-DR-eGFP-D2PEST-NLS Homologue 18 |
| pSL2448 | pcDNA5/FRT-DR-eGFP-D2PEST-NLS Homologue 15 |
| pSL2449 | pcDNA5/FRT-DR-eGFP-D2PEST-NLS Homologue 19 |
| pSL2508 | pcDNA3.1_NLS_FLAG_HCO_Cas6_PspP1_Hom3 |
| pSL2509 | pcDNA3.1_NLS_FLAG_HCO_Cas6_Pru_Hom4 |
| pSL2510 | pcDNA3.1_NLS_FLAG_HCO_Cas6_Pga_Hom5 |
| pSL2511 | pcDNA3.1_NLS_FLAG_HCO_Cas6_Ssp_Hom6 |
| pSL2512 | pcDNA3.1_NLS_FLAG_HCO_Cas6_Vdi_Hom7 |
| pSL2513 | pcDNA3.1_NLS_FLAG_HCO_Cas6_VchOYP_Hom8 |
| pSL2514 | pcDNA3.1_NLS_FLAG_HCO_Cas6_Vsp16_Hom9 |
| pSL2515 | pcDNA3.1_NLS_FLAG_HCO_Cas6_VspF12_Hom10 |
| pSL2516 | pcDNA3.1_NLS_FLAG_HCO_Cas6_VchM1517_Hom12 |
| pSL2517 | pcDNA3.1_NLS_FLAG_HCO_Cas6_VspUCD_Hom13 |
| pSL2518 | pcDNA3.1_NLS_FLAG_HCO_Cas6_Awo_Hom14 |
| pSL2519 | pcDNA3.1_NLS_FLAG_HCO_Cas6_PspHJ_Hom15 |
| pSL2520 | pcDNA3.1_NLS_FLAG_HCO_Cas6_PS983_Hom17 |
| pSL2521 | pcDNA3.1_NLS_FLAG_HCO_Cas6_Vpa_Hom18 |
| pSL2522 | pcDNA3.1_NLS_FLAG_HCO_Cas6_Eas_Hom19 |

TABLE 5
Description of plasmids for TnsB expression
and activity assays in mammalian cells

| Plasmid | |
|---|---|
| ID | Plasmid name |
| pSL0283 | pCOLA_Vch_TnsA_TnsB_TnsC |
| pSL0303 | SP-cas9 human reporter 1 + 100-tdtomato |
| pSL0527 | pUC19_Vch_Tn7R_CmR_Tn7L |
| pSL0828 | pCDF_Vch_TniQ_Cascade_CRISPR(Target4_lacZ-690) |
| pSL1054 | pCOLA_Vch_TnsABC, NLS-TnsA |
| pSL1055 | pCOLA_Vch_TnsABC, TnsA-T2A, NLS-TnsB |
| pSL1482 | pCOLA_Vch_TnsABC, TnsB-T2A |
| pSL1738 | pCOLA_Vch_TnsAB(fusion)_TnsC |
| pSL2096 | pCOLA_Vch_NLS-TnsAB(fusion)_TnsC |
| pSL2097 | pCOLA_Vch_TnsAB(fusion)-NLS_TnsC |
| pSL2533 | p6A_Macrolab CMV_acGFP_noORI |
| pSL2542 | pCOLA_Vch_TnsAB(fusion)_internal-bpNLS_TnsC |
| pSL2550 | gRNA_tdTomato reporter 1-Transposon End Right |
| pSL2561 | gRNA_tdTomato reporter 1-Transposon Right End |
| pSL2621 | pcDNA3.1_hCO_Vch_BP-NLS-Cas8 |
| pSL2679 | pcDNA3.1_hCO_Vch_TnsB-BP-NLS_VP64 |
| pSL2792 | gRNA_tdTomato reporter 1-Transposon Right End_Hom3 |
| | PspP1 |
| pSL2793 | gRNA_tdTomato reporter 1-Transposon Right End_Hom5 |
| | Pga |
| pSL2794 | gRNA_tdTomato reporter 1-Transposon Right End_Hom6 |
| | Ssp |
| pSL2797 | gRNA_tdTomato reporter 1-Transposon Right End_Hom12 |
| | VchM1517 |
| pSL2798 | gRNA_tdTomato reporter 1-Transposon Right End_Hom13 |
| | VspUCD |
| pSL2800 | gRNA_tdTomato reporter 1-Transposon Right End_Hom17 |
| | PS983 |
| pSL2801 | gRNA_tdTomato reporter 1-Transposon Right End_Hom18 |
| | Vpa |
| pSL2802 | pcDNA3.1(+)_Hom3_P1-25_TnsB-BPNLS-VP64 |
| pSL2803 | pcDNA3.1(+)_Hom5_JCM12487 TnsB-BPNLS-VP64 |
| pSL2804 | pcDNA3.1(+)_Hom6_UCD-KL21_TnsB-BPNLS-VP64 |
| pSL2808 | pcDNA3.1(+)_Hom12_M1517_TnsB-BPNLS-VP64 |
| pSL2809 | pcDNA3.1(+)_Hom13_UCD-SED10_TnsB-BPNLS-VP64 |
| pSL2810 | pcDNA3.1(+)_Hom17_S983_TnsB-BPNLS-VP64 |
| pSL2811 | pcDNA3.1(+)_Hom18_FORC_071_TnsB-BPNLS-VP64 |
| pSL2825 | pcDNA3.1_hCO_Vch_TnsA_BP-NLS_TnsB-VP64 |

TABLE 6
Description of plasmids for TuiQ-Cascade and InsC
expression and activity assays in mammalian cells

| Plasmid ID | Plasmid name |
|---|---|
| pSL0302 | CAGG-eBFP2 |
| pSL0341 | mCherry reporter for CRISPRa |
| pSL1061 | pcDNA3.1_hCO_Vch_NLS-TnsA |
| pSL1198 | pcDNA3.1_hCO_Vch_NLS-Cas6-T2A |
| pSL1409 | p6A_Vch_hU6_CRISPR(tSL0105) |
| pSL1490 | pcDNA3.1_hCO_Vch_Cas6 |
| pSL2084 | p6A_Vch_hU6_CRISPR((SL0264) |
| pSL2533 | p6A_Macrolab CMV_acGFP_noORI |
| pSL2620 | pcDNA3.1_hCO_Vch_BP-NLS-TniQ |
| pSL2621 | pcDNA3.1_hCO_Vch_BP-NLS-Cas8 |
| pSL2622 | pcDNA3.1_hCO_Vch_BP-NLS-Cas7 |
| pSL2623 | pcDNA3.1_hCO_Vch_BP-NLS-Cas6 |
| pSL2783 | p6A_hCO_Vch_TnsC_BP-NLS-VP64 |

TABLE 7
Description of Plasmids for RNA Polymerase
II-based expression of INTEGRATE guide RNAs

| Plasmid | |
|---|---|
| ID | Plasmid name |
| pSL2869 | pcDNA3.1(+)_BP- |
| | NLS_VchCas6_Triplex_VchCRISPR_tSL0264 |
| pSL2871 | pcDNA3.1(+)_BP- |
| | NLS_VchCas7_Triplex_VchCRISPR_tSL0264 |
| pSL2945 | pUC19-RF-CMVe/p-PuroR-T2A-eGFP-BGH-LF_U6 |
| | tSL0264 |

### Example 12

### RNA-Guided DNA Integration in Human Cells

[0308] A plasmid-based transposition assay was adapted in order to reconstitute RNA-guided DNA integration in human cells, using the modified expression vectors mentioned elsewhere. The strategy relies on co-transfection of all of the necessary protein expression vectors (TniQ, Cas8, Cas7, Cas6, TnsC, and TnsABf), a vector encoding gRNA, a donor DNA vector (pDonor), and a target DNA vector (pTarget); cut-and-paste transposition occurs within the transfected cells, resulting in a new plasmid in which the mini-transposon present on pDonor is integrated into the pTarget plasmid, downstream of the 32-bp target site complementary to the gRNA sequence. TnsABf refers to an engineered fusion protein in which the polypeptide sequences for TnsA and InsB are fused and connected with a linker sequence that also encodes a nuclear localization signal. Isolated DNA may be tested directly for the presence of integrated pTarget product, based on unique and characteristic junction PCR products specific to the expected transposition product. In control experiments, the gRNA sequence was replaced with a non-targeting (scrambled) control; and/or the pTarget plasmid may also be modified to eliminate the target site; and/or one or more expression vectors may be omitted from the transfection mix; and/or one or more expression vectors may contain point mutations in the amino acid sequence of a necessary protein that will lead to an inability for the CRISPR-Tn system to enzymatically perform transposition.

[0309] To assess RNA-guided DNA transposition activity in human cells, HEK293T cells were transfected with plasmid mixtures using Lipofectamine 2000 and standard protocols. Plasmid sequences are described in Table 8, and plasmid combinations used in transfections are described in Table 9. Cells were cultured at 37° C. with 5% CO₂, the media was replaced approximately 24 hours after transfection, and cells were harvested for analysis 72 hours post-transfection. DNA was harvested from HEK293T cells using QuickExtract DNA Extraction Solution (Lucigen) and standard protocols. Various PCR reactions were then performed on genomic lysates. In order to increase the sensitivity of the PCR reactions, nested PCR in which a small aliquot of a completed PCR reaction is carried over to a new PCR reaction in which new primers are used that anneal within the expected amplicon from the original PCR may be used. FIG. 19 describes the associated workflow to detect RNA-guided DNA integration.

[0310] When all requisite expression vectors, a gRNA expression vector that targets the same DNA sequence as used for TnsC-based transcriptional activation, and both pDonor and pTarget were co-transfected, evidence of RNA-guided transposition with Tn7016 based on the presence of junction amplicons via nested PCR was obtained. These amplicons were not produced when a gRNA expression vector was used that encoded a non-targeting (scrambled) sequence. When the amplicons from duplicate biological transfections were sequenced using a primer that anneals to the right end of the Tn7016 mini-Tn, the expected genotype was observed in which the primary product from the population contained the mini-Tn integrated 49-bp downstream of the target sequence matching the gRNA spacer.

[0311] Primers and probes were designed to selectively amplify, and therefore quantify, insertion events via quantitative real-time PCR. By comparing the amplification of insertion events to the amplification of a region of the target plasmid that does not contain insertion events, an editing efficiency was estimated to range from 0.1-0.4% (FIGS. 20A and 20D), representing an approximately 50× increase relative to the system from Tn6677 tested under similar conditions. This value also represents a lower estimate since there was no selection for transfected cells in these experiments.

[0312] In order to streamline the donor DNA construct, the transposon ends of Tn7016 were rationally truncated, as was previously done with Tn6677 (Klompe et al., Nature 571, 219-225 (2019)). These designs were tested in both bacterial cells and human cells for RNA-guided DNA integration activity. Starting pDonor designs contained 250-bp derived from the E. ascidiicola genome at both transposon ends, despite knowledge from prior work that these sequences encompass both the minimal transposon ends as well as additional transposon sequence that is not important for transposase-transposon DNA recognition. During rational engineering of the transposon ends, the left end was truncated to a length of 145 base pairs (bp), counting from the terminal 5′-TG directly at the genome-transposon junction), and the right end was truncated to lengths of either 157 bp, 75 bp, or 57 bp (FIG. 20B) Relative to the starting pDonor that contained 250-bp at both ends, the truncated variants were equivalently active in E. coli for RNA-guided DNA integration (FIG. 20C).

[0313] Using the same truncated pDonor designs, but with vectors used for RNA-guided DNA integration in human cells, integration events were genotyped using the primers to amplify both Tn6677 and Tn7016 integration products for quantitative real-time PCR analysis. Biological duplicate integration assays were performed in which either Tn6677 or Tn7016 mobilized their respective mini-Tn substrates on pDonor to pTarget using the exact same 32-nt gRNA spacer sequence. Quantitative PCR analysis revealed that Tn7016 exhibited approximately 50× higher integration efficiency compared to Tn6677 (FIG. 20D), with the truncated transposon end pDonor construct.

[0314] Tn7016 components may exhibit optimal performance with NLS tag placement that is distinct from the optimal placement observed with components from Tn6677. Previous integration assays using Tn7016 protein components contained an N-terminal NLS tag, except for TnsAB_{f}, which contained an internal NLS tag at the junction of TnsA and TnsB. Whether relocation of the NLS tag to the C-terminus of certain proteins would increase the overall integration efficiency was tested. In order to investigate potential tolerance towards C-terminal NLS tags, NLS tags were individually relocated from the N-terminus to the C-terminus in each component, and then its impact on transposition efficiency while all other protein components maintained N-terminal NLS tags was analyzed. As shown in FIG. 21, Tn7016 is notably tolerant to various C-terminal NLS placements, wherein migrating the NLS tag to the C-terminal end of Cas8, Cas7, and Cas6 showed no drop in integration efficiency relative to the condition in which all N-terminal termini were tagged. Additionally, these experiments demonstrated that switching the NLS tag from the N-terminus to the C-terminus of TnsC resulted in a marked increase in integration efficiency. This demonstrates that protein components from Tn7016 show unique preference/allowance for terminal tagging.

[0315] Proteins which show permissiveness towards C-terminal tagging may be tagged with additional epitope tags, and/or “ribosomal skipping” 2A peptides. In certain embodiments, the inclusion of C-terminal 2A peptide tags enabled the construction of polycistronic expression vectors, wherein multiple protein components are encoded on a single fusion mRNA transcript but translated as distinct polypeptides. This allowed reduction in the total number of individual plasmids that need to be delivered for expression of all the necessary components. In embodiments where mRNA is delivered directly to cells, in lieu of plasmid DNA, the same strategy enabled delivery of fewer distinct mRNA molecules. For example, rather than delivery Cas6, Cas7, and Cas8 mRNA separately, a mRNA encoding Cas6-2A-Cas7-2A-Cas8 could be delivered, whereby the 2A sequence leads to termination and translation initiation in cells, such that individual Cas6, Cas7, and Cas8 polypeptides are generated.

TABLE 8
Sequence and description of plasmids used in RNA-guided DNA
targeting and/or integration experiments in eukaryotes

| Plasmid ID | Plasmid name |
|---|---|
| pSL0341 | pTarget(mCherry reporter for CRISPRa and pTarget) |
| pSL1409 | pCRISPR-NT [p6A_Vch_hU6_CRISPR(tSL0105)] |
| pSL2084 | pCRISPR_T [p6A_Vch_hU6_CRISPR(tSL0264)] |
| pSL2123 | Tn6677_pDonor (pR6K_Vch_TnR(57bp)_Pcat_CmR_ToL) |
| pSL2190 | Tn7016_pDonor(pUC57_pDonor_TnR(250bp)_TnL(250bp)) |
| pSL2620 | pTniQ (pcDNA3.1_hCO_Vch_BP-NLS-TniQ) |
| pSL2621 | pCas8 (pcDNA3.1_hCO_Vch_BP-NLS-Cas8) |
| pSL2622 | pCas7 (pcDNA3.1_hCO_Vch_BP-NLS-Cas7) |
| pSL2623 | pCas6 (pcDNA3.1_hCO_Vch_BP-NLS-Cas6) |
| pSL2645 | pTnsC (pcDNA3.1_hCO_Vch_BP-NLS-TnsC) |
| pSL2669 | pTnsABf (pcDNA3.1_hCO_Vch_TnsA_BP-NLS_TnsB) |
| pSL2783 | p6A_hCO_Vch_TnsC_BP-NLS-VP64 |
| pSL2880 | pThiQ (pcDNA3.1_BP-NLS_ThiQ Tn7011 (Homolog 3)) |
| pSL2881 | pCas8 (pcDNA3.1_BP-NLS_Cas8 Tn7011 (Homolog 3)) |
| pSL2882 | pCas7 (pcDNA3.1_BP-NLS_Cas7 Tn7011 (Homolog 3)) |
| pSL2883 | pCas6 (pcDNA3.1_BP-NLS_Cas6 Tn7011 (Homolog 3)) |
| pSL2884 | pTnsC (pcDNA3.1_BP-NLS_TnsC Tn7011 (Homolog 3)) |
| pSL2885 | p6A_Tn7011_hU6_CRISPR_NT |
| pSL2886 | p6A_Tn7011_hU6_CRISPR_tSL0264 |
| pSL2887 | TnsC-VP64_Tn7011 |
| pSL2888 | pTniQ (pcDNA3.1_BP-NLS_TniQ Tn7010 (Homolog 5)) |
| pSL2889 | pCas8 (pcDNA3.1_BP-NLS_Cas8 Tn7010 (Homolog 5)) |
| pSL2890 | pCas7 (pcDNA3.1_BP-NLS_Cas7 Tn7010 (Homolog 5)) |
| pSL2891 | pCas6 (pcDNA3.1_BP-NLS_Cas6 Tn7010 (Homolog 5)) |
| pSL2892 | pTnsC (pcDNA3.1_BP-NLS_TnsC Tn7010 (Homolog 5)) |
| pSL2893 | p6A_Tn7010_hU6_CRISPR_NT |
| pSL2894 | p6A_Tn7010_hU6_CRISPR_tSL0264 |
| pSL2895 | TnsC-VP64_Tn7010 |
| pSL2896 | pTniQ (pcDNA3.1_BP-NLS_TniQ Tn7015 (Homolog 6)) |
| pSL2897 | pCas8 (pcDNA3.1_BP-NLS_Cas8 Tn7015 (Homolog 6)) |
| pSL2898 | pCas7 (pcDNA3.1_BP-NLS_Cas7 Tn7015 (Homolog 6)) |
| pSL2899 | pCas6 (pcDNA3.1_BP-NLS_Cas6 Tn7015 (Homolog 6)) |
| pSL2900 | pTnsC (pcDNA3.1_BP-NLS_TnsC Tn7015 (Homolog 6)) |
| pSL2901 | p6A_Tn7015_hU6_CRISPR_NT |
| pSL2902 | p6A_Tn7015_hU6_CRISPR_tSL0264 |
| pSL2903 | TnsC-VP64_Tn7015 |
| pSL2904 | pTniQ (pcDNA3.1_BP-NLS_TniQ Tn7005 (Homolog 12)) |
| pSL2905 | pCas8 (pcDNA3.1_BP-NLS_Cas8 Tn7005 (Homolog 12)) |
| pSL2906 | pCas7 (pcDNA3.1_BP-NLS_Cas7 Tn7005 (Homolog 12)) |
| pSL2907 | pCas6 (pcDNA3.1_BP-NLS_Cas6 Tn7005 (Homolog 12)) |
| pSL2908 | pTnsC (pcDNA3.1_BP-NLS_TnsC Tn7005 (Homolog 12)) |
| pSL2909 | p6A_Ta7005_hU6_CRISPR_NT |
| pSL2910 | p6A_Tn7005_hU6_CRISPR _tSL0264 |
| pSL2911 | TnsC-VP64_Tn7005 |
| pSL2912 | pTniQ (pcDNA3.1_BP-NLS_ThiQ Tn7016 (Homolog 17)) |
| pSL2913 | pCas8 (pcDNA3.1_BP-NLS_Cas8 Tn7016 (Homolog 17)) |
| pSL2914 | pCas7 (pcDNA3.1_BP-NLS_Cas7 Tn7016 (Homolog 17)) |
| pSL2915 | pCas6 (pcDNA3.1_BP-NLS_Cas6 Tn7016 (Homolog 17)) |
| pSL2916 | pTnsC (pcDNA3.1_BP-NLS_TnsC Tn7016 (Homolog 17)) |
| pSL2917 | p6A_Tn7016_hU6_CRISPR_NT |
| pSL2918 | p6A_Tn7016_hU6_CRISPR_tSL0264 |
| pSL2919 | TnsC-VP64_Tn7016 |
| pSL2920 | pTniQ (pcDNA3.1_BP-NLS_TniQ Tn7003 (Homolog 18)) |
| pSL2921 | pCas8 (pcDNA3.1_BP-NLS_Cas8 Tn7003 (Homolog 18)) |
| pSL2922 | pCas7 (pcDNA3.1_BP-NLS_Cas7 Tn7003 (Homolog 18)) |
| pSL2923 | pCas6 (pcDNA3.1_BP-NLS_Cas6 Tn7003 (Homolog 18)) |
| pSL2924 | pTnsC (pcDNA3.1_BP-NLS_TnsC Tn7003 (Homolog 18)) |
| pSL2925 | p6A_Tn7003_hU6_CRISPR_NT |
| pSL2926 | p6A_Tn7003_hU6_CRISPR_tSL0264 |
| pSL2927 | TnsC-VP64_Tn7003 |
| pSL3402 | pTnsAB(pcDNA3.1_TnsA _BP-NLS_TnsB Tn7016 (Homolog 17)) |
| pSL3430 | Tn7016_pDonor (pR6K_Tn7016_TnR_Pcat_CmR_TnL) |
| pSL3628 | pTniQ (pcDNA3.1_hCO_Tn7016_TniQ-BP-NLS) |
| pSL3629 | pCas8 (pcDNA3.1_hCO_Tn7016_Cas8-BP-NLS) |
| pSL3630 | pCas7 (pcDNA3.1_hCO_Tn7016_Cas7-BP-NLS) |
| pSL3631 | pCas6 (pcDNA3.1_hCO_Tn7016_Cas6-BP-NLS) |
| pSL3632 | pTnsC (pcDNA3.1_hCO_Tn7016_TnsC-NLS-BP-NLS) |
| pSL3591 | pUC57_pDonor_I-Fv_Pseudoalteromonas_sp.S983(Tn7016)_RE-157bp_LE-145bp |
| pSL3592 | pUC57_pDonor_I-Fv_Pseudoalteromonas_sp.S983(Tn7016)_RE-75bp_LE-145bp |
| pSL3593 | pUC57_pDonor_I-Fv_Pseudoalteromonas_sp.S983(Tn7016)_RE-57bp_LE-145bp |
| pSL2158 | pCDF_pCQT(tSL0004)_I-Fv_Pseudoalteromonas_sp.S983(Tn7016) |

TABLE 9
Table of plasmids used in transformation and/or transfection experiments

| Transfection | |
|---|---|
| ID # | Plasmids used in experiment |
| 1 | pSL0341, pSL2084, pSL2620, pSL2621, pSL2622, pSL2623, pSL2783 |
| 2 | pSL0341, pSL1409, pSL2620, pSL2621, pSL2622, pSL2623, pSL2783 |
| 3 | pSL0341, pSL2920, pSL2921, pSL2922, pSL2923, pSL2927, pSL2926 |
| 4 | pSL0341, pSL2920, pSL2921, pSL2922, pSL2923, pSL2927, pSL2925 |
| 5 | pSL0341, pSL2904, pSL2905, pSL2906, pSL2907, pSL2911, pSL2910 |
| 6 | pSL0341, pSL2904, pSL2905, pSL2906, pSL2907, pSL2911, pSL2909 |
| 7 | pSL0341, pSL2888, pSL2889, pSL2890, pSL2891, pSL2895, pSL2894 |
| 8 | pSL0341, pSL2888, pSL2889, pSL2890, pSL2891, pSL2895, pSL2893 |
| 9 | pSL0341, pSL2880, pSL2881, pSL2882, pSL2883, pSL2887, pSL2886 |
| 10 | pSL0341, pSL2880, pSL2881, pSL2882, pSL2883, pSL2887, pSL2885 |
| 11 | pSL0341, pSL2896, pSL2897, pSL2898, pSL2899, pSL2903, pSL2902 |
| 12 | pSL0341, pSL2896, pSL2897, pSL2898, pSL2899, pSL2903, pSL2901 |
| 13 | pSL0341, pSL2912, pSL2913, pSL2914, pSL2915, pSL2919, pSL2918 |
| 14 | pSL0341, pSL2912, pSL2913, pSL2914, pSL2915, pSL2919, pSL2917 |
| 15 | pSL0341, pSL2912, pSL2913, pSL2914, pSL2915, pSL2916, pSL2917, pSL3402, pSL3430 |
| 16 | pSL0341, pSL2912, pSL2913, pSL2914, pSL2915, pSL2916, pSL2918, pSL3402, pSL3430 |
| 17 | pSL0341, pSL2084, pSL2123, pSL2620, pSL2621, pSL2622, pSL2623, pSL2645, pSL2669 |
| 18 | pSL0341, pSL2912, pSL2913, pSL2914, pSL2915, pSL2916, pSL2918, pSL3402, pSL3593 |
| 19 | pSL0341, pSL2912, pSL2913, pSL2914, pSL2915, pSL2916, pSL2918, pSL3402, pSL3593 |
| 20 | pSL0341, pSL3628, pSL2913, pSL2914, pSL2915, pSL2916, pSL2918, pSL3402, pSL3593 |
| 21 | pSL0341, pSL2912, pSL3629, pSL2914, pSL2915, pSL2916, pSL2918, pSL3402, pSL3593 |
| 22 | pSL0341, pSL2912, pSL2913, pSL3630, pSL2915, pSL2916, pSL2918, pSL3402, pSL3593 |
| 23 | pSL0341, pSL2912, pSL2913, pSL2914, pSL3631, pSL2916, pSL2918, pSL3402, pSL3593 |
| 24 | pSL0341, pSL2912, pSL2913, pSL2914, pSL2915, pSL3632, pSL2918, pSL3402, pSL3593 |
| 25 | pSL0341, pSL3628, pSL3629, pSL3630, pSL3631, pSL3632, pSL2918, pSL3402, pSL3593 |
| 26 | pSL2158, pSL2190 |
| 27 | pSL2158, pSL3591 |
| 28 | pSL2158, pSL3592 |
| 29 | pSL2158, pSL3593 |

### Example 13

### RNA-Guided DNA Integration in Human Cells

[0316] Using a Type I-F system derived from Vibrio cholerae Tn6677, DNA insertions were demonstrated in multiple bacterial species that exhibited exquisite genome-wide specificity and could be easily reprogrammed to user-defined sites with single-bp accuracy. Long-read whole-genome sequencing confirmed the purity of integration products, and additional heterologous reconstitution experiments demonstrated autonomous enzymatic function independent of obligate recombination factors. RNA-guided transposases were leveraged for targeted DNA integration in mammalian cells, despite the formidable obstacle of reconstituting a complex, multi-component pathway that depends on a donor DNA, guide CRISPR RNA (crRNA), and assembly of seven distinct proteins, many of which function in an oligomeric state (FIGS. 22A and 22B).

[0317] Bacterial Tn7-like transposons have co-opted at least three distinct types of nuclease-deficient CRISPR-Cas systems for RNA-guided transposition (I—B, I—F, and V-K), with each exhibiting unique features. Fidelity and programmability parameters for experimentally characterized CRISPR-transposon systems, alongside recently described Cas9-transposase fusion approaches, were carefully reviewed. Type I-F V. cholerae CRISPR-associated transposon (VchINTEGRATE, or VchINT) was of particular focus because of its optimal integration efficiency, specificity, and absence of cointegrates. Within this system, a ribonucleoprotein complex comprising TniQ and Cascade (VchQCascade, with stoichiometry Cas8₁-Cas7₆-Cas6₁-crRNA₁-TniQ₂) performs RNA-guided DNA targeting, thereby defining sites for transposon DNA insertion. Excision and integration reactions are catalyzed by the heteromeric TnsA-TnsB transposase, but only after prior recruitment of the AAA+ ATPase, TnsC. Although the stoichiometry of TnsABC in the final holo-transpososome is not known, ˜6 copies of a InsAB heterodimer and 7 or more copies of TnsC are likely optimal.

[0318] A methodical, bottom-up approach was adopted to port VchINT into human cells. Whether the component parts were being efficiently expressed, each protein-coding gene was cloned onto a standard mammalian expression vector with an N- or C-terminal nuclear localization signal (NLS) and 3×FLAG epitope tag (FIG. 22B). Using Western blotting, robust heterologous protein expression, both individually and when all INTEGRATE proteins were co-expressed, was observed (FIG. 22C). Cellular fractionation provided evidence of nuclear trafficking, and efficient expression and trafficking of an engineered TnsAB fusion protein (TnsAB_{f}) that was previously shown to retain wild-type activity was also demonstrated (FIG. 24).

[0319] To assess guide RNA expression, a previously developed approach to monitor crRNA biogenesis within the 5′ untranslated region (UTR) of a messenger RNA encoding GFP was adapted. Cas6 is a ribonuclease subunit of Cascade that cleaves the CRISPR repeat sequence in most Type I CRISPR-Cas systems, which in the assay would sever the 5′ cap from the GFP open reading frame and thus lead to fluorescence knockdown (FIG. 22D). A near-total loss of GFP fluorescence was observed when the reporter plasmid was co-transfected with cognate VchCas6, but not when the reporter encoded a non-cognate CRISPR repeat or lacked a repeat altogether (FIG. 22E). Interestingly, GFP knockdown was substantially reduced when Cas6 contained a C-terminal NLS or 2A peptide (FIG. 22E), indicating a sensitivity to terminal tagging that could not be easily explained by the cryoEM structure. Collectively, these experiments verified expression of all protein and RNA components from VchINT, leading us to next focus on functional reconstitution of RNA-guided DNA targeting by QCascade.

[0320] A promoter-driven chloramphenicol resistance cassette (CmR) was cloned within the mini-transposon of a donor plasmid (pDonor), and the same sequence on the mCherry reporter plasmid (pTarget) that was used in transcriptional activation experiments was targeted. Upon successful transposition in HEK293T cells, integrated pTarget products will carry both CmR and KanR drug markers and can thus be selected for by transforming E. coli with plasmid DNA isolated from transfected cells (FIG. 14A). In these experiments a pDonor backbone that cannot be replicated in standard E. coli strains was used, reducing background from unreacted plasmids. A TnsAB fusion protein (InsABf) that contains an internal bipartite NLS and maintains wild-type activity in E. coli (FIG. 24C) was also used, thereby reducing the number of unique protein components.

[0321] After transfecting HEK293T cells with pDonor, pTarget, and all protein-crRNA expression plasmids, purifying the plasmid mixture from cells, and using the mixture to transform E. coli, the emergence of colonies that were chloramphenicol and kanamycin resistant were observed, which outnumbered the corresponding colonies obtained in non-targeting control experiments. Junction PCR was performed on select colonies and bands of the expected size were obtained, which subsequent Sanger sequencing confirmed were integration products arising from DNA transposition 49-bp downstream of the target site (FIG. 23A). The same products were detected by nested PCR directly from HEK293T cell lysates (FIG. 25A), and a sensitive Taqman probe-based qPCR strategy was developed to quantify integration events from lysates by detecting site-specific, plasmid-transposon junctions (FIG. 25B). Using this approach, an initial optimization screen was performed by varying the relative amounts of expression and pDonor plasmids and efficiencies were greatest with low levels of pTnsC and high levels of pTnsAB_{f} and pDonor (FIG. 25C) Absolute efficiencies of plasmid-to-plasmid transposition were <1%.

[0322] Bioinformatic mining and experimental characterization identified 18 new Type I-F3 CRISPR-associated transposons (Tn7000-Tn7017), many of which exhibit high-efficiency and high-fidelity RNA-guided DNA integration in E. coli. A hierarchical screening approach was used to uncover variants with improved activity in human cells (FIG. 26A). Briefly, the screening approach involved filtering based on robust activity in three key areas: (i) crRNA biogenesis by Cas6, assessed using the GFP knockdown assay; (ii) transposon DNA binding by TnsB, assessed using a tdTomato reporter assay; and (iii) transcriptional activation by TnsC-VP64, assessed using the mCherry reporter assay. In all cases, genes were human codon optimized, which often facilitated strong expression (FIG. 26B), and tagged with NLS sequences on the same termini as for Tn6677 (VchINT). The majority of systems exhibited efficient crRNA biogenesis and transposon DNA binding activity that was similar to that observed with Tn6677 (FIGS. 26C and 26D). Tn7016 showed reproducible induction of mCherry expression, albeit at levels ˜8-fold lower than Tn6677 (FIG. 26E). Tn7016, a 31-kb transposon from Pseudoalteromonas sp. S983, hereafter PseINT, was investigated for its RNA-guided DNA integration activity.

[0323] After verifying that fusing TnsA and TnsB from PseINT with an internal NLS retained function, and optimizing the length of left and right transposon ends (FIGS. 27A and 27B), plasmid-to-plasmid transposition assays were repeated in HEK293T cells. PseINT was ˜40-fold more active than the most optimized version of VchINT when tested under unoptimized conditions, and PCR followed by Sanger or Illumina sequencing analysis confirmed the expected site of integration 49-bp downstream of the target (FIGS. 23C, 23D, and 27C). To further improve integration efficiencies, the design of the crRNA, location of NLS tags, and relative amounts of each expression plasmid, were systematically varied which collectively yielded a further ˜10-fold improvement to reach levels of 3-5% integration (FIGS. 23E and 27, FIGS. 27D-27G). In the course of these experiments, peak integration occurred 4-6 days post-transfection, and the integration efficiency was sensitive to cell density (FIGS. 28A and 28B). Since the experimental approach thus far involved co-transfection of nine distinct plasmids, that activity could vary considerably based on not only the stoichiometry of the transfected plasmids but also the range of plasmid amounts received across the population of cells. To test this, a GFP transfection marker was co-transfected and the top 20% brightest cells were into four bins based on their fluorescence level and then separately analyzed for integration. The integration efficiency increased concomitantly with GFP expression, with the top bin exhibiting >5-fold higher activity than the unsorted cell population (FIGS. 28C and 28D).

[0324] Transposition was conditional on a targeting crRNA and the presence of all protein components, including an intact TusB active site (FIG. 23F), and functioned with genetic payloads spanning 1-15 kb in size, albeit with a ˜3-fold decrease in efficiency with larger payloads (FIG. 23G). A panel of mismatched crRNAs was generated in which mutations were tiled along the length of the 32-nt guide, and activity was found to be ablated regardless of the location (FIG. 23H), indicating a greater degree of discrimination than that observed in activation experiments or in E. coli. Finally, an alternative qPCR approach was used to confirm that integration orientation for PseINT was highly biased towards tRL, and both droplet digital PCR (ddPCR) and amplicon sequencing were performed to further corroborate the quantitative data obtained from Taqman qPCR (FIG. 29).

TABLE 10

| Plasmid ID | Plasmid name |
|---|---|
| pSL0341 | mCherry reporter for CRISPRa |
| pSL0454 | pcDNA3.1 hCO pse_Cascade-Cas7-VP64 |
| pSL0532 | 6A U6-I-E_pse_CRISPR(Hsa07-2) |
| pSL0534 | 6A_hU6_I-E_PseS-6-2_CRISPR(non-targeting) |
| pSL2276 | Pse I-E_DR-eGFP |
| pSL2277 | Tn6677_DR-eGFP |
| pSL2279 | Pse I-E pCas6 |
| pSL812 | Vch stuffer crRNA |
| pSL2645 | Vch pTnsC |
| pSL3617 | Pse stuffer crRNA |
| pSL1567 | pCDF_Vch_PT7_CRISPR(Target4)_QCascade_TnsABC_T7Term w/all Permissive |
| | Eukaryotic Terminal Tags |
| pSL2912 | Pse pTniQ |
| pSL2913 | Pse pCas8 |
| pSL2914 | Pse pCas7 |
| pSL2915 | Pse pCas6 |
| pSL3713 | Pse pTnsC-3xNLS |
| pSL3402 | Pse pTnsA-NLS-Bf |
| pSL2620 | pcDNA3.1_hCO_Vch_BP-NLS-TniQ |
| pSL2621 | pcDNA3.1_hCO_Vch_BP-NLS-Cas8 |
| pSL2622 | pcDNA3.1_hCO_Vch_BP-NLS-Cas7 |
| pSL2623 | pcDNA3.1_hCO_Vch_BP-NLS-Cas6 |
| pSL3626 | Vch pDonor |
| pSL3637 | Pse pDonor |
| pSL2669 | pcDNA3.1_hCO_Vch_TnsA_BP-NLS_TnsB |
| pSL2693 | pcDNA3.1_hCO_VP64_Vch_BP-NLS-Cas7 |
| pSL2783 | p6A_hCO_Vch_TnsC_BP-NLS-VP64 |
| pSL1236 | pDonor |
| pSL1014 | pQCascade, NT |
| pSL1478 | pQCascade, NLS-Cas8 |
| pSL1479 | pQCascade, Cas8-T2A |
| pSL1051 | pQCascade, NLS-Cas7 |
| pSL1480 | pQCascade, Cas7-T2A |
| pSL2282 | pQCascade, NLS-Cas6 |
| pSL1053 | pQCascade, Cas6-T2A |
| pSL1419 | pQCascade, NLS-TniQ |
| pSL1477 | pQCascade, TniQ-T2A |
| pSL1483 | pTnsABC, NLS-TnsC |
| pSL1484 | pTnsABC, TnsC-T2A |
| pSL1021 | pEffector, No tags, NT |
| pSL1022 | pEffector, No tags, WT |

[0325] Plasmid construction. Genes were human codon-optimized and synthesized by Genscript, and plasmids were generated using a combination of restriction digestion, ligation, Gibson assembly, and inverted (around-the-horn) PCR. All PCR fragments for cloning were generated using Q5 DNA Polymerase (NEB).

[0326] The CRISPR array sequence (repeat-spacer-repeat) for VchINT is as follows: 5′-GTGAACTGCCGAGTAGGTAGCTGATAAC-N₃₂-GTGAACTGCCGAGTAGGTAGCTGATAAC-3′, where N₃₂ represents the 32-nt guide region.

[0327] The sequence of the mature crRNA is as follows: 5′-CUGAUAAC-N₃₂-GUGAACUGCCGAGUAGGUAG-3′.

[0328] The CRISPR array sequence (repeat-spacer-repeat) for PseINT is as follows: 5′-GTGACCTGCCGTATAGGCAGCTGAAAAT-N₃₂-GTGACCTGCCGTATAGGCAGCTGAAAAT-3′, where N₃₂ represents the 32-nt guide region.

[0329] The sequence of the mature crRNA is as follows: 5′-CUGAAAAU-N₃₂-GUGACCUGCCGUAUAGGCAG-3′.

[0330] ‘Atypical’ repeats were used for PseINT (unless otherwise mentioned) to reduce the likelihood of recombination during cloning. For these variant CRISPR arrays, the repeat-spacer-repeat sequence is as follows: 5′-GTGACCTGCCGTATAGGCAGCTGAAGAT-N₃₂-TAATTCTGCCGAAAAGGCAGTGAGTAGT-3′, where N₃₂ represents the 32-nt guide region.

[0331] The sequence of the mature crRNA is as follows: 5′-CUGAAGAU-N₃₂-UAAUUCUGCCGAAAAGGCAG-3′.

[0332] E. coli culturing and general transposition assays. Chemically competent E. coli BL21(DE3) cells carrying pDonor, pDonor and pTnsABC, or pDonor and pQCascade, were prepared and transformed with 150-250 ng of pEffector, pQCascade, or pTnsABC, respectively. Transformations were plated on agar plates with the appropriate antibiotics (100 μg/ml spectinomycin, 100 μg/ml carbenicillin, 50 ng/ml kanamycin) and 0.1 mM IPTG. For bacterial transposition assays investigating PseINT activity, cells were co-transformed with pEffector and pDonor. Cells were incubated for 18-20 h at 37° C. and typically grew as densely spaced colonies, before being scraped, resuspended in LB medium, and prepared for subsequent analysis.

[0333] E. coli qPCR analysis of transposition products. The optical density of resuspended colonies from the transposition assays was measured at 600 nm, and approximately 3.2×10⁸ cells (the equivalent of 200 μl of OD600=2.0) were pelleted by centrifugation at 4,000×g for 5 min. The cell pellets were resuspended in 80 μl of H₂O, before being lysed by incubating at 95° C. for 10 min in a thermal cycler. The cell debris was pelleted by centrifugation at 4,000×g for 5 min, and 5 μl of lysate supernatant was removed and serially diluted in water to generate 20- and 500-fold lysate dilutions for qPCR analysis. Integration in the tRL orientation was measured by qPCR by comparing Cq values of a tRL-specific primer pair (one transposon- and one genome-specific primer) to a genome-specific primer pair that amplifies an E. coli reference gene (rssA). Transposition efficiency was then calculated as 2^{ΔCq}, in which ΔCq is the Cq difference between the experimental reaction and the reference reaction. qPCR reactions (10 μl) contained 5 μl of SsoAdvanced Universal SYBR Green Supermix (BioRad), 1 μl H₂O, 2 μl of 2.5 μM primers, and 2 μl of 500-fold diluted cell lysate. Reactions were prepared in 384-well clear/white PCR plates (BioRad), and measurements were performed on a CFX384 Real-Time PCR Detection System (BioRad) using the following thermal cycling parameters: polymerase activation and DNA denaturation (98° C. for 3 min), and 35 cycles of amplification (98° C. for 10 s, 59° C. for 1 min).

[0334] Mammalian cell culture and transfections. HEK293T cells were cultured at 37° C. and 5% CO₂. Cells were maintained in DMEM media with 10% FBS and 100 U/mL of penicillin and streptomycin (Fisher Scientific). The cell line was authenticated by the supplier and tested negative for mycoplasma. Cells were typically seeded at approximately 100,000 cells per well in a 24-well plate (Eppendorf or Fisher Scientific) coated with PDL (Fisher Scientific), 24 hours prior to transfection. Cells were transfected with DNA mixtures and 2 μl of Lipofectamine 2000 (Fisher Scientific), per the manufacturer's instructions.

[0335] Western imnumoblotting and nuclear cytoplasmic fractionation. Cells were transfected with epitope-tagged protein expression plasmids. Approximately 72 hours after transfection, cells were washed with PBS and harvested using Cell Lysis Buffer (150 mM NaCl, 0.1% Triton X-100, 50 mM Tris-HCl pH 8.0, Protease inhibitor (Sigma Aldrich)). For nuclear and cytoplasmic fractionation experiments, cells were harvested using Cell Lysis Buffer (Thermo Fisher Scientific) per the manufacturer's instructions. Proteins were separated by SDS-PAGE and transferred to a PVDF membrane (Fisher Scientific). The membrane was then washed with TBS-T (50 mM Tris-Cl, pH 7.5, 150 mM NaCl, 1% Tween-20) and blocked with blocking buffer (TBS-T with 5% w/v BSA). Membranes were then incubated with primary antibodies overnight at 4° C. in blocking buffer. Membranes were then washed and incubated with secondary antibodies at room temperature for one hour. Membranes were again washed and then developed with SuperSignal West Dura (Thermo Fisher).

[0336] HEK293T fluorescent reporter assays and flow cytometry analysis and sorting. HEK293T cells were seeded at approximately 50,000 cells per well in a 24-well plate coated with PDL 24 hours prior to transfection. For Cas6-mediated RNA processing assays, cells were co-transfected with 300 ng of GFP-reporter plasmid, 300 ng of Cas6 expression plasmid, and 10 ng of an mCherry expression plasmid (as a transfection marker). In negative control experiments, cells were transfected with 300 ng of a dCas9 expression plasmid instead of a Cas6 expression plasmid to control for possible expression burden or squelching. For transcriptional activation assays, cells were co-transfected with 60 ng of reporter plasmid, 20 ng of a plasmid encoding an orthogonal fluorescent protein (as a transfection marker), and the additional indicated plasmids. In separately wells, cells were transfected with 100 ng of Cas9-based transcriptional activators and 50 ng of either a non-targeting or targeting sgRNA as positive controls.

[0337] DNA mixtures were transfected using 2 μl of Lipofectamine 2000 (Fisher Scientific), per the manufacturer's instructions. Approximately 72-96 hours after transfection, cells were collected for assay by flow cytometry. Transfected cells were analyzed by gating based on fluorescent intensity of the transfection marker relative to a negative control. For assays that involved cell sorting, cells were transfected with a GFP expression plasmid and collected 4 days after transfection. A BD FACS Aria flow cytometer was used to sort cells and obtain flow cytometry data. Cells with the top 20% brightest GFP fluorescence were sorted by 5% increments into 4 bins. Cells were immediately harvested after sorting, as detailed below.

[0338] HEK293T genomic activation and RT-qPCR analysis. HEK293T cells were seeded at approximately 50,000 cells per well in a 24-well plate coated with PDL 24 hours prior to transfection. Cells were co-transfected as described above, with the following VchINT components: 100 ng pTnsABt, 50 ng pTnsC-VP64, 50 ng pTniQ, 50 ng pCas6, 250 ng pCas7, 50 ng pCas8, and 62.5 ng each of 4 targeting crRNAs for TTN, MIAT, and ASCL1 (or 83.3 ng each of 3 targeting crRNAs for ACTC1) (pCRISPR). In control experiments, cells were co-transfected with 100 ng of either pdCas9-VP64 or pdCas9-VPR plasmid, 62.5 ng each of 4 targeting sgRNAs for TTN (psgRNA), and a pUC19 plasmid to standardize transfected DNA amounts. Cells were harvested 72 hours after transfection using the RNeasy Plus Mini Kit (Qiagen), according to the manufacturer's instructions. cDNA was subsequently synthesized using the iScript cDNA Synthesis Kit (BioRad) using 1000 ng of RNA in a 20 uL reaction. Gene-specific qPCR primers were designed to amplify an approximately 180-250 bp fragment to quantify the RNA expression of each gene, and a separate pair of primers was designed to amplify ACTB (beta-actin) reference gene for normalization purposes.

[0339] qPCR reactions (10 μl) contained 5 μl of SsoAdvanced Universal SYBR Green Supermix (BioRad), 2 μl H₂O, 1 μl of 5 μM primer pair, and 2 μl of cDNA diluted 1:4 in H₂O. Reactions were prepared in 384-well white PCR plates (BioRad), and measurements were performed on a CFX384 Real-Time PCR Detection System (BioRad) using the following thermal cycling parameters: polymerase activation and DNA denaturation (98° C. for 2 min), 40 cycles of amplification (95° C. for 10 s, 60° C. for 30 s), and terminal melt-curve analysis (65-95° C. in 0.5° C. per Ss increments). Each condition was analyzed using three biological replicates, and two technical replicates were run per sample. Normalized gene activation was calculated as the ratio of the 2^{-ΔCq} of the targeting samples to the non-targeting samples, in which ΔCq is the Cq difference between the experimental gene primer pair and the reference gene primer pair.

[0340] HEK293T plasmid-to-plasmid integration assays. For assays in which plasmids were isolated and used to transform bacteria, HEK293T cells were transfected with requisite VchINT expression plasmids, a pDonor that contained a non-replicative origin of replication (R6K), a pTarget plasmid, and a crRNA expression plasmid (pCRISPR) that either encoded a non-targeting crRNA or a crRNA targeting pTarget. 72 hours after transfection, cells were thoroughly washed with PBS, harvested using TrypLE (Fisher Scientific), neutralized with culture media, and pelleted. After removal of supernatant, transfected plasmids were harvested using Qiagen Miniprep columns per the manufacturer's instructions, and further concentrated using the Qiagen MinElute column. Of this final purified plasmid mixture, 1 μl was used to electroporate NEB 10-beta electrocompetent E. coli cells (NEB) per the manufacturer's instructions. After recovery at 37° C., cells were plated onto LB-agar plates containing chloramphenicol. Chloramphenicol-resistant colonies were then replated onto LB-agar plates containing both chloramphenicol and kanamycin, and doubly-resistant colonies were harvested for genotypic analyses.

[0341] For all other integration assays, HEK293T cells were counted using a Countess 3 Cell Counter and seeded at 20,000 cells per well, unless otherwise specified, in a 24-well plate coated with PDL 24 hours prior to transfection. Cells were transfected using plasmid DNA mixtures and 2 μl of Lipofectamine 2000, per the manufacturer's instructions. For VchINT transposition assays, HEK293T cells were transfected with the following VchINT components, unless otherwise stated: 100 ng each of pTnsAB_{f}, pTnsC, pTniQ, pCas6, pCas7, pCas8, pDonor, pTarget, and 50 ng of a targeting or non-targeting crRNA (pCRISPR). For PseINT transposition assays, HEK293T cells were transfected with the following PseINT components, unless otherwise specified: 200 ng of pTnsAB, 50 ng each of pTnsC, pTniQ, pCas6, pCas7, and pCas8, 200 ng of pDonor, and 100 ng of pTarget and a targeting or non-targeting crRNA (pCRISPR).

[0342] Unless otherwise stated, cells were cultured for 4 days after transfection. Cells were washed with DPBS with no calcium or magnesium (Fisher Scientific), harvested using TrypLE (Fisher Scientific), and neutralized with culture media. 20% of the resuspended cells were pelleted by centrifugation at 300×g for 5 minutes, and the supernatant was aspirated. Cell pellets were resuspended in 50 μL of Quick Extract (Lucigen), and genomic DNA was prepared per the manufacturer's instructions.

[0343] For assays that utilized puromycin selection, HEK293T cells were transfected as described above with PseINT component plasmids and an additional 50 ng of puromycin resistance expression plasmid (as a transfection marker). Media was changed 24 hours after transfection, and selection with 1 μg/mL of puromycin was started on half of the samples. Cells were harvested using Quick Extract (Lucigen) per the manufacturer's instructions beginning at 2 days after transfection until 6 days after transfection, with or without puromycin selection. For assays that utilized cell sorting, HEK293T cells were transfected as described above with PseINT component plasmids and an additional 5 ng of GFP expression plasmid (as a transfection marker).

[0344] For assays that utilized cargo sizes ranging from 798 bp to 15 kb, HEK293T cells were transfected as described above with PseINT component plasmids, except the 5 kb, 10 kb, and 15 kb pDonor plasmids were transfected in molar equivalents to the 798 bp pDonor (˜406 fmol), to account for the size difference between donor plasmids. For assays that utilized amplicon deep sequencing, HEK293T cells were transfected as described above, with a pDonor plasmid that contained a primer binding site immediately downstream of the right transposon end that matched a primer binding site present in the unedited pTarget plasmid. Cells were harvested 4 days after transfection.

[0345] Nested PCR analysis of transposition assays. DNA amplification was performed by PCR using Q5 Hot Start High-Fidelity DNA Polymerase (NEB) following the manufacturer's protocol. In brief, 1 μL of cell lysate was added to a 25 μL PCR reaction. Thermocycling conditions were as follows: 98° C. for 45 seconds, 98° C. for 15 seconds, 66° C. for 15 seconds, 72° C. for 10 seconds, 72° C. for 2 minutes, with steps 2-4 repeated 24 times. The annealing temperature was adjusted depending on primers used. 1 μL of the first PCR reaction served as the template for a second 25 μL PCR reaction that was run under the same thermocycling conditions. Primer pairs contained one pTarget-specific primer and one transposon-specific primer, and the primers used in the second PCR reaction generated a smaller amplicon than the first reaction. PCR amplicons were resolved by 1-2% agarose gel electrophoresis and visualized by staining with SYBR Safe (Thermo Scientific). Negative control samples were always analyzed in parallel with experimental samples to identify mis-priming products, some of which presumably result from the analysis being performed on crude cell lysates that still contain the pDonor and pTarget.

[0346] qPCR analysis of plasmid-to-plasmid transposition products. Transposition-specific qPCR primers were designed to amplify a ˜140-bp fragment to quantify transposition efficiency. Primer pairs were designed to span a transposition junction, with the forward primer annealing to pTarget and the reverse primer annealing within the transposon. Additionally, a custom 5′ FAM-labeled, ZEN/3′ IBFQ probe (IDT) was designed to anneal to the plasmid-transposon junction. A separate pair of primers and a SUN-labeled, ZEN/3′ IBFQ probe (IDT) were designed to amplify a distinct segment of the target plasmid for efficiency calculation purposes.

[0347] Probe-based qPCR reactions (10 uL) contained 5 uL of Taqman Fast Advanced Master Mix, 0.5 uL of each 18 uM primer pair, 0.5 uL of each 5 uM probe, 1 uL of H₂O, and 2 uL of ten-fold diluted cell lysate. Reactions were prepared in 384-well white PCR plates (BioRad), and measurements were performed on a CFX384 Real-Time PCR Detection System (BioRad) using the following thermal cycling parameters: polymerase activation (95° C. for 10 minutes) and 50 cycles of amplification (95° C. for 15 seconds, 59.5° C. for 1 minute). Each condition was analyzed using either two or three biological replicates, and two technical replicates were run per sample. Baseline threshold ratios were manually adjusted to be 1:1 for the reference primer pair to the transposition primer pair. Transposition efficiency was calculated as a percentage as 2^{-ΔCq} times 100 in which ΔCq is the Cq difference between the reference primer pair and the transposition primer pair.

[0348] To analyze the frequency of left-right insertion (tLR) versus right-left insertion (tRL) of the PseINT transposon, transposition-specific qPCR primers were designed to span the tLR transposition junction, in addition to the primer pairs used for tRL integration and the reference amplicon in the probe-based qPCR analysis described above. qPCR reactions (10 μL) contained 5 μl of SsoAdvanced Universal SYBR Green Supermix (BioRad), 2 μl H₂O, 1 μl of 5 μM primer pair, and 2 μl of ten-fold diluted cell lysate. Reactions were prepared in 384-well white PCR plates (BioRad), and measurements were performed on a CFX384 Real-Time PCR Detection System (BioRad) using the following thermal cycling parameters: polymerase activation and DNA denaturation (98° C. for 2 min), 50 cycles of amplification (95° C. for 10 s, 59.5° C. for 20 s), and terminal melt-curve analysis (65-95° C. in 0.5° C. per 5 s increments). Each condition was analyzed using three biological replicates, and two technical replicates were run per sample.

[0349] ddPCR analysis of plasmid-to-plasmid transposition products. During harvesting of HEK293T transposition assays, 50% of the resuspended cells were reserved during lysate generation. 500 μL of resuspended cells were pelleted by centrifugation at 300×g for 5 minutes. The supernatant was aspirated, and DNA was extracted from cell pellets using the Qiagen DNeasy Blood and Tissue Kit (Qiagen). DNA was eluted in H₂O and diluted to a concentration of 2.5 ng/μL. ddPCR was performed with the same primers and probes as detailed above for plasmid-to-plasmid transposition analysis. ddPCR reactions (20 μL) contained 10 μL of ddPCR Supermix for Probes (Biorad), 1 μL of each 5 μM probe, 1 μL of each 18 μM primer pair, 5 units of HindIII (NEB), 4.13 μL of H₂O, and 2 μL of 2.5 ng/μL DNA. Reactions were assembled at room temperature, and droplets were generated using the Biorad QX200 Droplet Generator according to the manufacturer's instructions. Thermocycling was performed on a Biorad C1000 Touch Thermocycler with the following parameters: enzyme activation (95° C. for 10 minutes), 40 cycles of amplification (94° C. for 30 second, 61.5° C. for 1 minute) and enzyme deactivation (98° C. for 10 minutes). After thermocycling, droplets were hardened at 4° C. for 2 hours. Droplets were analyzed using the QX200 Droplet Reader according to the manufacturer instructions. Transposition percentages were calculated as the number of FAM positive molecules divided by the number of SUN/VIC positive molecules times 100.

[0350] Preparation of amplicons for NGS analysis. PCR-1 products were generated as described above, except primers contained universal Illumina adaptors as 5′ overhangs and the cycle number was reduced to 20. These products were then diluted 20-fold into a fresh polymerase chain reaction (PCR-2) containing indexed p5/p7 primers and subjected to 10 additional thermal cycles using an annealing temperature of 65° C. After verifying amplification by analytical gel electrophoresis, barcoded reactions were pooled and resolved by 2% agarose gel electrophoresis, DNA was isolated by Gel Extraction Kit (Qiagen), and NGS libraries were quantified by qPCR using the NEBNext Library Quant Kit (NEB). Illumina sequencing was performed using the NextSeq platform with automated demultiplexing and adaptor trimming (Illumina).

[0351] To determine the integration site distribution for a given sample, junction sequences consisting of 10-bp genomic/pTarget and 8-bp transposon end sequences were tallied for integration events 45-55 bp downstream of the PAM-distal end of the target sequence. Histograms were plotted after compiling these distances across all the reads within a given library.

### Example 14

[0352] RNA-Guided DNA Integration into Endogenous Human Genomic Target Sites

[0353] To demonstrate that RNA-guided DNA integration could be directed to target sites present endogenously in the human genome, additional guide RNAs targeting numerous genomic target sites were designed. Protein and guide RNA components were delivered via plasmid transfection, and the mini-transposon donor DNA was delivered via plasmid transfection. To verify the presence of successful integration events, and to improve the overall sensitivity for detection, a next generation sequencing (NGS) strategy was employed. Specifically, the strategy involved amplifying both the wild-type (unedited) and edited (integration-positive) alleles in a single step, such that analysis of the resulting amplicon-seq data would allow us to calculate overall integration efficiencies. To achieve this, a short sequence (approximately 20 nucleotides) was cloned within the mini-transposon on pDonor immediately inside the right transposon end; this sequence is identical to a genomic sequence downstream of the target site targeted by the CRISPR gRNA. Thus, when PCR is performed with two genome-specific primers, one primer-binding site will be present on both the unedited chromosome as well as the edited chromosome within the integrated mini-transposon, e.g., the second genome-specific primer anneals to a sequence that is present both in the donor DNA and the WT locus. With this strategy, the unedited (WT) allele and the integration-product alleles are amplified simultaneously (FIG. 30A). Using custom code for the ensuing NGS analysis, amplicons that contain a right transposon end can be differentiated from the unedited (WT) locus, integration efficiencies can be calculated, and the distance between the target site and the integration site can additionally be extracted.

[0354] Using this method, genomic integration events were reproducibly detected and quantified at a target site within the AAVS1 locus, when using a crRNA that targeted the endogenous sequence 5′-ACAGTGGGGCCACTAGGGACAGGATTGGTGAC-3′ (SEQ ID NO: 293) (FIG. 30B). When the target site distribution was analyzed, a preference for insertion events occurring 49-bp downstream of the target site was observed (FIG. 30C), similar to what has been previously observed for plasmid-to-plasmid transposition events in human cells, and for genomic transposition events in E. coli (Klompe et al., Nature 571, 219-225 (2019)).

[0355] This strategy can be broadly applied to detect integration activity at additional human genomic target sites. As expected, integration was detected and quantified at two additional target sites, including another site within the AAVS1 locus (denoted AAVS1_2) and a target site within the ACTB locus (FIG. 30D). This approach can be adopted to any additional target sites to enable highly sensitive detection and quantification of INTEGRATE-mediated transposition events.

### Example 15

### Modified Donor DNA Formulations for RNA-Guided DNA Integration

[0356] In many embodiments, the mini-transposon donor DNA is delivered to eukaryotic cells within the context of a circular DNA molecular, termed pDonor. Type I-F CRISPR-transposon systems encode the necessary enzymatic machinery to excise the mini-transposon through cleavage of both strands at both ends, via the combined action of TnsA (an endonuclease-family protein) and TusB (a DDE transposase-family protein), as was experimentally determined using long-read sequencing (Vo et al., Mob DNA 12, 13 (2021)). Because of this mechanism, the mini-transposon may also be delivered to cells within alternative contexts, since the desired genetic payload is excised through TnsA-TnsB cleavage, and the flanking (vector) DNA sequences are degraded in the cell.

[0357] In another embodiment, the mini-transposon is delivered to cells in a linear, covalently closed donor DNA form (lccDNA). This embodiment limits the amount of extraneous DNA being delivered to the cell and obviates the need to include bacterial origin and antibiotic resistance sequences that are necessary for standard plasmid cloning procedures. In addition to removing unwanted prokaryotic elements, which can enhance immunocompatibility within host eukaryotic cells, these minimized transgene vector are also smaller in size and may exhibit improved extracellular and intracellular availability, leading to improve integration (Nafissi and Slavcev. Microb. Cell Fact. 11, 154-13 (2012)). To generate lecDNA constructs, novel starting pDonor plasmids are designed and cloned, in which the mini-transposon—comprising a desired genetic payload flanked by right and left transposon end sequences, specific to the CRISPR-transposon machinery being used—is flanked on both sides with a 56-bp sequence that is recognized by the TelN protelomerase enzyme; an example of such pDonor sequence is given by SEQ ID NO: 270. Subsequently, after isolating the modified pDonor constructs from bacteria, they are incubated with the TelN enzyme (NEB), thereby generating covalently closed donor DNA. lccDNA donor molecules are separated away from unreacted pDonor and from the flanking vector backbone by gel electrophoresis, or other separation methods. The lccDNA donor molecules are then combined with standard delivery of the CRISPR-transposon protein and RNA machinery, which may be encoded by plasmids (in the case of plasmid transfection), or delivered as mRNA and gRNA, or delivered as purified protein and ribonucleoprotein complexes. lccDNA donor molecules may also be generated using alternative methods and enzymes that are standard in the field.

[0358] In other embodiments, lccDNA donor molecules are pre-complexed with the TsB transposase, such that preformed transposase-DNA co-complexes are delivered in a single step, which may be performed together with the delivery of the TniQ-Cascade complex and other transposase components (e.g., TnsA and TnsC). In other embodiments, lccDNA donor molecules are pre-complexed with the fusion TnsA-TnsB polypeptide, such that preformed transposase-DNA co-complexes are delivered in a single step; this may be performed together with the delivery of the TniQ-Cascade complex and other transposase components (e.g., TnsC). These delivery strategies, involving pre-complexing of the donor DNA with purified transposase components, may also be applied to any other donor DNA formulation, including but not limited to circular plasmid donor DNAs, lccDNA donor DNAs, simple linear donor DNAs, and linear donor DNAs with chemically modified ends. These chemically modified ends may include biotin modifications, phosphorothioate modifications, and other modifications that prevent or restrict the extent of enzymatic degradation within eukaryotic cells.

[0359] In another embodiment, mini-transposon donor DNAs are delivered to eukaryotic cells in a minimized format through the generation of minicircle DNA. Many studies have shown that minicircle DNAs can enhance transgene expression in a variety of cell types and organs, and importantly, minicircle donor DNAs also eliminate undesired prokaryotic components such as bacterial origin and antibiotic resistance sequences (Munye et al., Sci Rep 6, 23125 (2016)). Minicircle DNA substrates can also be generated in a supercoiled form. Minicircle donor DNA substrates for CRISPR-transposon based RNA-guided DNA integration applications are generated using standard methods, in which the insertion of recombination sequences flanking the mini-transposon is used, together with engineered strains of E. coli, to produce minicircles prior to the harvesting of cells and isolation of the desired DNA. The DNA may be isolated by a variety of analytical separation techniques, and the placement and identity of the recombination sequences may be optimized for greatest minicircle DNA yield, while ensuring that DNA integration activity with the CRISPR-transposon machinery is maintained within cells.

[0360] In other embodiments, minicircle donor molecules are pre-complexed with the TosB transposase, such that preformed transposase-DNA co-complexes are delivered in a single step, which may be performed together with the delivery of the TniQ-Cascade complex and other transposase components (e.g., TnsA and TnsC). In other embodiments, minicircle donor molecules are pre-complexed with the fusion TnsA-TnsB polypeptide, such that preformed transposase-DNA co-complexes are delivered in a single step; this may be performed together with the delivery of the TniQ-Cascade complex and other transposase components (e.g., TnsC).

### Example 16

### RNA-Guided DNA Integration Using Modified Guide CRISPR RNAS

[0361] Type I-F CRISPR-transposon systems typically encode CRISPR arrays that, when transcribed into pre-crRNA and then processed via the Cas6 ribonuclease, produce a 60-nucleotide RNA species containing an 8-nucleotide 5′ “handle,” a 32-nucleotide “spacer”, and a 20-nucleotide 3′ “handle” that contains a stem-loop structure. However, type I-F CRISPR-associated transposons have been shown to encode “atypical” crRNA sequences in which the 5′ and 3′ repeat sequences may encode mutations, and in which the spacer sequence is not strictly 32-nucleotides in length (Petassi et al., Cell 183, 1757-1771.e18 (2020); Klompe et al,. Mol Cell 82, 616-628.e5 (2022)). In addition, it is well known within the CRISPR field that spacer length across CRISPR arrays may be somewhat variable, depending on the CRISPR-Cas system and the CRISPR array itself, and that spacer length variation may be tolerated by the effector complexes specific to a given system.

[0362] We explored whether crRNA guides containing variable length spacer sequences would still function with PseINT, and more generally, whether alternative spacer lengths would be tolerated by CRISPR-transposon systems. It has been previously demonstrated that some variable lengths are tolerated, when increased or decreased the spacer length in 6-nt increments (Klompe et al., Nature 571, 219-225 (2019)), but here it was further investigated whether perturbations that were smaller in size would still be tolerated. Working with the PseINT system (e.g., derived from Tn7016), CRISPR arrays were generated in which the spacer contained a targeting sequence of variable length, such that the resulting mature crRNA guide would have the fixed 8-nt 5′-handle and 20-nt 3′ handle, but an intervening spacer of variable length. Within this embodiment, the spacer was varied from 20-nt to 44-nt in length, with single-nt variations tested in the length range from 30-34 (FIG. 31). Using these modified pCRISPR plasmids, RNA-guided DNA integration was tested in human cells using a plasmid-to-plasmid transposition assay, in which pDonor, pTarget, and the necessary protein and RNA expression plasmids were delivered via transfection. After culturing cells for multiple days post-transfection and then harvesting the DNA, integration was quantified using qPCR and it was found that multiple spacer lengths supported targeted, RNA-guided DNA integration. In particular, the results demonstrate that a spacer length of 33-nt functions as well, if not better, than the spacer length of 32-nt that is most commonly observed in native CRISPR arrays for Type I-F CRISPR-transposon systems (FIG. 31).

[0363] These modified crRNA guides may be used in the context of other transposition experiments, including experiments targeting human genomic sites for DNA integration. Modified crRNAs containing a 33-nt spacer may also be used for recombinant expression and purification of Cascade and/or TniQ-Cascade complexes in E. coli, such that the modified crRNA guides are delivered to mammalian cells as pre-formed, purified RNP complexes, together with the necessary transposase and donor DNA components.

### Example 17

### Streamlined Polycistronic Expression Vectors Encoding the TniQ-Cascade Complex

[0364] When investing the sensitivity of VchINT (e.g., derived from Tn6677) to the placement of epitope tags on various termini, a significant ablation of RNA-guided DNA integration activity was observed when multiple components possessed a C-terminal tag. This limited opportunities to condense the number of independent mRNA transcripts required to express the system in mammalian cells using ribosome skipping sequences known as “2A peptides.” Despite the great extent to which 2A peptides have been used in biotechnology application, the peptide that induces premature termination and reinitiation of protein synthesis on the downstream ORF remains as an obligate peptide sequence tag on the C-terminus of the upstream protein. Thus, this strategy is unavailable when upstream proteins to not tolerate C-terminal appendages.

[0365] When the NLS tag sensitivity of PseINT (e.g., derived from Tn7016), which is a homologous Type I-F CRISPR-transposon system was investigated, C-terminal tags on TnsC were preferred over N-terminal tags, but that more generally, C-terminal tags were broadly tolerated across all of the protein components of the Cascade complex (e.g., Cas6, Cas7, and Cas8); however, TniQ still functioned best with an N-terminal tag, and did not tolerate C-terminal tags (FIG. 32). Thus, in certain embodiments, alternative expression vectors for the PseINT TniQ-Cascade complex were explored, in which ribosomal skipping 2A peptides were reintroduced within the context of polycistronic designs, thus allowing multiple proteins to be produced from fewer promoter-driven expression constructs. Specifically, several polycistronic vectors were designed in which all protein components of the TniQ-Cascade complex (e.g., Cas6, Cas7, Cas8, and TniQ) were encoded on a single mRNA transcript. Given the strong preference for N-terminal appendages on TniQ, all four constructs tested encoded TiQ as the final component with an N-terminal NLS tag; the remaining Cas6, Cas7, and Cas8 components were tested in various order arrangements, and in each case, contained tandem C-terminal NLS and 2A peptide tags, enabling both nuclear localization and ribosome skipping (FIG. 22.3B). Within the context of these strategies, where multiple protein-coding genes are arrayed and separated by 2A peptides, prior studies have shown that upstream protein components are generally expressed more strongly than downstream protein components (Liu et al., Sci Rep 7, 2193 (2017)).

[0366] Polycistronic vectors were screened via plasmid-to-plasmid transposition assays, in which protein and RNA expression plasmids were delivered to human cells together with pDonor and pTarget via transfection, and similar integration efficiencies were observed across all constructs, with slightly higher efficiencies when Cas7 was the first protein translated in the mRNA transcript (FIG. 32B). Genomic integration efficiencies were also investigated with polycistronic vectors encoding Cas7 first and observed higher DNA integration activity when the TniQ-Cascade complex was expressed in the order of Cas7-Cas8-Cas6-TniQ (FIG. 32C). In both plasmid- and genome-targeting DNA integration assays, the integration activity of the CRISPR-transposon systems was as high, or higher, using polycistronic vector designs for the TniQ-Cascade complex, as when each of the protein components was encoded on its own individual vector. This condensing of expression vectors reduced the number of transfected plasmids from 8 to 5 in order to carry out genomic integration.

[0367] In other embodiments, the protein components for the ToiQ-Cascade complex (e.g., TniQ, Cas6, Cas7, and Cas8) are delivered to cells via mRNA, in which the proteins may each be encoded on individual capped and polyadenylated mRNAs, or in which the proteins are similarly encoded within single capped and polyadenylated mRNAs that contain NLS and 2A peptide sequences separating each of the 4 ORF sequences.

[0368] In other embodiments, the CRISPR array may be encoded within the same polycistronic TniQ-Cascade vector, by placing an additional U6 promoter-driven element elsewhere on the plasmid. Within this embodiment, a single vector contains all the genetic instructions to express the protein and RNA components of the TniQ-Cascade complex.

[0369] In other embodiments, the CRISPR array is cloned directly within the 3′ UTR of the polycistronic vector design, optionally with stabilizing sequences upstream of the first repeat. Within this embodiment, the mature crRNA is processed directly from the capped and polyadenylated mRNA through the enzymatic action of Caso, and the stabilizing sequence upstream of the first repeat prevents rapid degradation of the protein-coding portion of the mRNA. This modified strategy allows for a single mRNA to serve as both the genetic instructions to express the protein components and guide crRNA, and thereby facilitates delivery and expression in target eukaryotic cells.

### Example 18

### Homologous CRISPR-Transposon Systems for RNA-Guided DNA Integration

[0370] As disclosed herein, PseINT, derived from Tn7016, exhibited higher RNA-guided DNA integration efficiencies in human cells when compared to VchINT, derived from Th6677. The initial set of homologs screened were highly diverse, and only sampled a small proportion of existing Type I-F CRISPR-associated transposons. In other embodiments, many other homologs are tested that are derived from this collection of potential Type I-F CRISPR-transposon systems, and these systems are screened for their ability to direct RNA-guided DNA integration activity in eukaryotic cells, either using the complete intact system, or by mixing and matching components from various systems to find a combination that optimizes expression, stability, cross-reactivity, genome-wide specificity, and integration efficiency.

[0371] In one embodiment, additional CRISPR-transposon systems were specifically screened to investigate whether TniQ homologs would be able to function together with the other protein, RNA, and donor DNA components from PseINT (e.g., derived from Tn7016). More specifically, cells were transfected with PseINT (e.g., Tn7016) components—including a polycistronic vector encoding Cas7, Cas8, and Cas6, a vector encoding the TnsA-TnsB fusion polypeptide, a vector encoding the TnsC protein, a pCRISPR vector encoding the crRNA guide, and a pDonor vector encoding the mini-transposons—and then the system was complemented with either the cognate TniQ expression vector where the gene was derived from the same Tn70176 CRISPR-transposon system, or from a homologous CRISPR-transposon system (FIGS. 33A and 33B). These vectors were all combined with pTarget, and DNA integration was determined for plasmid-to-plasmid transposition in human cells As controls, TniQ proteins derived from Tn7015, Tn7014, and a transfection in which no TniQ was included, as all of these should exhibit no integration activity. TniQ proteins from Tn7014 and Tn7015, as well as the absence of TniQ altogether, led to a complete loss of integration activity, whereas the 3 nearby homologs tested (derived from CRISPR-associated transposons hereafter referred to Tn7018, Tn7019, and Tn7020) exhibited successful RNA-guided integration (FIG. 33C). Tn7018 is derived from Pseudoalteromonas sp. SG43-3; Tn7019 is derived from Pseudoalteromonas sp. P1-13-Ja, and Tn7020 is derived from Pseudoalteromonas arabiensis.

[0372] In other embodiments, the protein components from Tn7016 are combinatorially tested with protein, RNA, and donor DNA components from Tn7018, Tn7019, and Tn7020 in other permutations, or from other homologous CRISPR-transposon systems, in order to optimize for expression, specificity, and efficiency. In additional embodiments, structure-guided protein engineering is used to generate modified variants and/or chimeric sequences that leverage the most optimal performance of each component.

[0373] The scope of the present invention is not limited by what has been specifically shown and described hereinabove. Those skilled in the art will recognize that there are suitable alternatives to the depicted examples of materials, configurations, constructions, and dimensions. Variations, modifications, and other implementations of what is described herein will occur to those of ordinary skill in the art without departing from the spirit and scope of the invention.

[0374] Numerous references, including patents and various publications, are cited and discussed in the description of this invention. The citation and discussion of such references is provided merely to clarify the description of the present invention and is not an admission that any reference is prior art to the invention described herein. All references cited and discussed in this specification are incorporated herein by reference in their entirety.

What is claimed is:

1. A system for RNA-guided DNA integration in a eukaryotic cell, comprising:
an engineered Clustered Regularly Interspaced Short Palindromic Repeats (CRISPR)-CRISPR associated (Cas) transposon (CRISPR-Tn) system or one or more nucleic acids encoding the engineered CRISPR-Tn system, wherein the CRISPR-Tn system comprises at least one or both of:
a) at least one Cas protein;
b) at least one transposon-associated protein; and
c) a guide RNA (gRNA) complementary to at least a portion of a target nucleic acid sequence;
wherein one or more of the at least one Cas protein and the at least one transposon-associated protein comprises a nuclear localization signal (NLS).

2. The system of claim 1, wherein one or more of the at least one Cas protein and the at least one transposon-associated protein comprises two or more NLSs.

3. The system of claim 1 or claim 2, wherein the NLS is at an N-terminus, a C-terminus, embedded in the one or more of the at least one Cas protein and the at least one transposon-associated protein or a combination thereof.

4. The system of any of claims 1-3, wherein the NLS is a monopartite sequence.

5. The system of any of claims 1-3, wherein the NLS is a bipartite sequence.

6. The system of claim 5, wherein the NLS comprises a sequence having at least 70% similarity to KRTADGSEFESPKKKRKV (SEQ ID NO:89).

7. The system of any of claim 1-6, wherein the at least one Cas protein is derived from a Type-I CRISPR-Cas system.

8. The system of any of claim 1-7, wherein the at least one Cas protein comprises Cas5, Cas6, Cas7, and Cas8.

9. The system of any of claim 1-8, wherein the at least one Cas protein comprises a Cas8-Cas5 fusion protein.

10. The system of any of claims 1-9, wherein the at least one transposon protein is derived from a Tn7 or Tn7-like transposon system.

11. The system of any of claims 1-10, wherein the at least one transposon-associated protein comprises TnsA, TnsB, TnsC, or a combination thereof.

12. The system of any of claims 1-11, wherein the at least one transposon protein comprises a TnsA-TnsB fusion protein.

13. The system of claim 12, wherein the TnsA-TnsB fusion protein further comprises an amino acid linker between TnsA and TnsB.

14. The system of claim 13, wherein the linker is a flexible linker.

15. The system of claim 13 or claim 14, wherein the linker comprises at least one glycine-rich region.

16. The system of any of claims 13-15, wherein the linker comprises a NLS sequence.

17. The system of claim 16, wherein the linker comprises a NLS sequence flanked on each end by a glycine rich region.

18. The system of any of claims 1-17, wherein the at least one transposon-associated protein comprises TnsD and/or TniQ.

19. The system of any of claims 1-18, wherein the CRISPR-Tn system is derived from Vibrio cholerae, Photobacterium iliopiscarium, Vibrio parahaemolyticus, Pseudoalteromonas sp., Pseudoalteromonas ruthenica, Photobacterium ganghwense, Shewanella sp., Vibrio diazotrophicus, Vibrio sp. 16, Vibrio sp. F12, Vibrio splendidus, Aliivibrio wodanis, Aliivibrio sp., Endozoicomonas ascidiicola, and Parashewanella spongiae.

20. The system of any of claims 1-19, wherein the at least one gRNA is a non-naturally occurring gRNA.

21. The system of any of claims 1-20, wherein the at least one gRNA is encoded in a CRISPR RNA (crRNA) array.

22. The system of any of claims 1-21, wherein the gRNA is transcribed under control of an RNA Polymerase II promoter or RNA Polymerase III promoter.

23. The system of any of claims 1-22, wherein the one or more nucleic acids comprises one or more messenger RNAs, one or more vectors, or a combination thereof.

24. The system of any of claims 1-23, wherein the at least one Cas protein, the at least one transposon-associated protein, and the gRNA are encoded by different nucleic acids.

25. The system of any of claims 1-23, wherein one or more of the at least one Cas protein, the at least one transposon-associated protein, and the gRNA are encoded by a single nucleic acid.

26. The system of claim 24 or claim 25, wherein Cas7 is encoded by an individual nucleic acid.

27. The system of claim 25, wherein a single nucleic acid encodes the gRNA and at least one Cas protein.

28. The system of claim 27, wherein the at least one Cas protein is Cas6 or Cas7.

29. The system of any of claims 8-28, wherein the system comprises Cas7 or the nucleic acid encoding Cas7 in greater abundance compared to the remaining protein components or nucleic acids encoding thereof.

30. The system of claim 29, wherein each of the at least one Cas protein, the at least one transposon-associated protein, and the gRNA are encoded by a single nucleic acid.

31. The system of any of claims 1-30, wherein the one or more nucleic acids further comprise or encode a sequence capable of forming a triple helix downstream of the sequence encoding the at least one Cas protein or the sequence encoding the at least one transposon-associated protein.

32. The system of claim 31, wherein the sequence capable of forming a triple helix is in a 3′ untranslated region of the sequence encoding the at least one Cas protein or the sequence encoding the at least one transposon-associated protein.

33. The system of any of claims 1-32, wherein one or more of the nucleic acid encoding at least one Cas protein and the nucleic acid at least one transposon-associated protein comprises a sequence encoding a ribosome skipping peptide.

34. The system of claim 33, wherein the ribosome skipping peptide comprises a 2A family peptide.

35. The system of any of claims 1-34, wherein each of the at least one Cas protein and the at least one transposon-associated protein are part of a single fusion protein.

36. The system of any of claims 1-35, wherein one or more of the at least one Cas protein are part of a ribonucleoprotein complex with the gRNA.

37. The system of any of claims 1-36, further comprising a donor nucleic acid to be integrated, wherein said donor DNA comprises a cargo nucleic acid sequence flanked by at least one transposon end sequence.

38. A system for DNA integration into a target nucleic acid sequence comprising:
an engineered Clustered Regularly Interspaced Short Palindromic Repeats (CRISPR)-CRISPR associated (Cas) transposon (CRISPR-Tn) system or one or more nucleic acids encoding the engineered CRISPR-Tn system, wherein the CRISPR-Tn system comprises at least one or both of:
a) at least one Cas protein; and
b) TnsA, TnsB, TnsC, or a combination thereof,
wherein the engineered CRISPR-Tn system is derived from Vibrio parahaemolyticus, Aliibrio sp., Pseudoalteromonas sp., or Endozoicomonas ascidiicola.

39. The system of claim 38, wherein the engineered CRISPR-Tn system is a Type I-F system.

40. The system of claim 38 or claim 39, wherein the engineered CRISPR-Tn system is a Type I-F3 system.

41. The system of any of claims 38-40, wherein the one or more nucleic acids comprises one or more messenger RNAs, one or more vectors, or a combination thereof.

42. The system of any of claims 38-41, wherein the at least one Cas protein and the TnsA, TosB, and TnsC are encoded by different nucleic acids.

43. The system of any of claims 38-41 wherein the at least one Cas protein and the TnsA, TnsB, and TnsC are encoded by a single nucleic acid.

44. The system of any of claims 38-43, wherein the engineered CRISPR-Tn system further comprises TnsD, TniQ, or a combination thereof or a nucleic acid encoding TnsD, TniQ, or a combination thereof.

45. The system of any of claims 38-44, wherein the at least one Cas protein comprises Cas5, Cas6, Cas7, and Cas8.

46. The system of any of claims 38-45, wherein the at least one Cas protein comprises Cas8-Cas5 fusion protein.

47. The system of any of claims 38-46, wherein the engineered CRISPR-Tn system comprises Cas5, Cas6, Cas7, Cas8, TnsA, TnsB, TnsC, and at least one or both of TnsD or TniQ.

48. The system or kit of any of claims 38-47, wherein the engineered CRISPR-Tn system comprises TnsA, TnsB, TnsC, TnsD and TniQ.

49. The system of any of claims 46-48, wherein the system comprises Cas7 or a nucleic acid encoding Cas7 in greater abundance compared to the remaining protein components or nucleic acids encoding thereof.

50. The system of any of claims 38-49, wherein one or more of the at least one Cas protein, TnsA, TosB, TasC, TnsD, and TniQ comprises a nuclear localization signal (NLS).

51. The system of any of claims 38-50, wherein one or more of the at least one Cas protein, TnsA, TnsB, TnsC, TnsD, and TniQ comprises two or more NILSs.

52. The system of claim 50 or claim 51, wherein the NLS is at an N-terminus, a C-terminus, embedded in the at least one Cas protein, TnsA, TnsB, TnsC, TnsD, and TniQ, or a combination thereof.

53. The system of any of claims 38-52, wherein TnsA and TnsB are provided as a TnsA-TnsB fusion protein.

54. The system of claim 53, wherein the TnsA-TnsB fusion protein further comprises an amino acid linker between TnsA and InsB.

55. The system of claim 54, wherein the linker is a flexible linker.

56. The system of claim 54 or claim 55, wherein the linker comprises at least one glycine-rich region.

57. The system of any of claims 54-56, wherein the linker comprises a nuclear localization signal (NLS).

58. The system of claim 57, wherein the linker comprises a NLS flanked on each end by a glycine rich region.

59. The system of any of claims 50-58, wherein the NLS is a monopartite sequence.

60. The system of claim 59, wherein the NLS is a bipartite sequence.

61. The system of claim 59 or claim 60, wherein the NLS comprises a sequence having at least 70% similarity to KRTADGSEFESPKKKRKV (SEQ ID NO:89).

62. The system of any of claims 38-61, wherein the engineered CRISPR-Tn system further comprises at least one gRNA complementary to at least a portion of the target nucleic acid sequence, or a nucleic acid encoding the at least one gRNA.

63. The system of claim 62, wherein the at least one gRNA is encoded by a nucleic acid different from the nucleic acid(s) encoding the at least one Cas protein and TnsA, TnsB, and TnsC.

64. The system of claim 62, wherein the at least one gRNA is encoded by a nucleic acid also encoding the at least one Cas protein, TnsA, TnsB, and TnsC, or both.

65. The system of any of claims 62-64, wherein the at least one gRNA is a non-naturally occurring gRNA.

66. The system of any of claims 62-65, wherein the at least one gRNA is encoded in a CRISPR RNA (crRNA) array.

67. The system of any of claims 38-66, wherein the one or more nucleic acids further comprise or encode a sequence capable of forming a triple helix downstream of the sequence encoding the engineered CRISPR-Tn system.

68. The system of claim 67, wherein the sequence capable of forming a triple helix is in a 3′ untranslated region of the sequence encoding the at least one Cas protein or the sequence encoding at least one of TnsA, TnsB, TnsC, TnsD, and TniQ.

69. The system of any of claims 38-68, wherein one or more of the nucleic acids encoding the engineered CRISPR-Tn system comprises a sequence encoding a ribosome skipping peptide.

70. The system of claim 69, wherein the ribosome skipping peptide comprises a 2A family peptide.

71. The system of any of claims 38-70, further comprising a target nucleic acid sequence.

72. The system of claim 71, wherein the target nucleic acid sequence comprises a TnsD binding site.

73. The system of claim 71 or claim 72, wherein the target nucleic acid sequence comprises a human nucleic acid sequence.

74. The system of any of claims 38-73, further comprising a donor nucleic acid flanked by at least one transposon end sequence.

75. The system of kit of claim 74, wherein the donor nucleic acid comprises a human nucleic acid sequence.

76. The system or kit of claim 74 or claim 75, wherein the nucleic acid encoding the at least one Cas protein, TnsA, TnsB, and TnsC, the at least one gRNA, or any combination thereof further comprises the donor nucleic acid.

77. A system for RNA-guided DNA integration in a eukaryotic cell, comprising:
an engineered Clustered Regularly Interspaced Short Palindromic Repeats (CRISPR)-CRISPR associated (Cas) transposon (CRISPR-Tn) system or one or more nucleic acids encoding the engineered CRISPR-Tn system, wherein the CRISPR-Tn system comprises at least one or both of:
a) at least one Cas protein comprising Cas7;
b) at least one transposon-associated protein; and
c) a guide RNA (gRNA) complementary to at least a portion of a target nucleic acid sequence;
wherein the system comprises Cas7 or the nucleic acid encoding Cas7 in greater abundance compared to the remaining protein components or nucleic acids encoding thereof.

78. The system of claim 77, wherein one or more of the at least one Cas protein and the at least one transposon-associated protein comprises a nuclear localization signal (NLS).

79. The system of claim 77, wherein one or more of the at least one Cas protein and the at least one transposon-associated protein comprises two or more NLSs.

80. The system of claim 78 or claim 79, wherein the NLS is appended to the one or more of the at least one Cas protein and the at least one transposon-associated protein at a N-terminus, a C-terminus, or a combination thereof.

81. The system of any of claims 78-80, wherein the NLS is a monopartite sequence.

82. The system of any of claims 78-80, wherein the NLS is a bipartite sequence.

83. The system of claim 82, wherein the NLS comprises a sequence having at least 70% similarity to KRTADGSEFESPKKKRKV (SEQ ID NO:89).

84. The system of any of claim 77-83, wherein the at least one Cas protein is derived from a Type-I CRISPR-Cas system.

85. The system of any of claim 77-84, wherein the at least one Cas protein comprises Cas5, Cas6, Cas7, and Cas8.

86. The system of claim 85, wherein the at least one Cas protein comprises a Cas8-Cas5 fusion protein.

87. The system of any of claims 77-86, wherein the at least one transposon protein is derived from a Tn7 or Tn7-like transposon system.

88. The system of any of claims 77-87, wherein the at least one transposon-associated protein comprises TnsA, TnsB, and TnsC.

89. The system of any of claims 77-88, wherein the at least one transposon protein comprises a TnsA-TnsB fusion protein.

90. The system of claim 89, wherein the TnsA-TnsB fusion protein further comprises an amino acid linker between TnsA and TnsB.

91. The system of claim 90, wherein the linker is a flexible linker.

92. The system of claim 90 or claim 91, wherein the linker comprises at least one glycine-rich region.

93. The system of any of claims 90-92, wherein the linker comprises a NLS sequence.

94. The system of claim 93, wherein the linker comprises a NLS sequence flanked on each end by a glycine rich region.

95. The system of any of claims 77-94, wherein the at least one transposon-associated protein comprises TnsD and/or TniQ.

96. The system of any of claims 77-95, wherein the CRISPR-Tn system is derived from Vibrio cholerae, Photobacterium iliopiscarium, Vibrio parahaemolyticus, Pseudoalteromonas sp., Pseudoalteromonas ruthenica, Photobacterium ganghwense, Shewanella sp., Vibrio diazotrophicus, Vibrio sp. 16, Vibrio sp. F12, Vibrio splendidus, Aliivibrio wodanis, Aliivibrio sp., Endozoicomonas ascidiicola, and Parashewanella spongiae.

97. The system of any of claims 77-96, wherein the at least one gRNA is a non-naturally occurring gRNA.

98. The system of any of claims 77-97, wherein the at least one gRNA is encoded in a CRISPR RNA (crRNA) array.

99. The system of any of claims 77-98, wherein the gRNA is transcribed under control of an RNA Polymerase II promoter.

100. The system of any of claims 77-99, wherein the one or more nucleic acids comprises one or more messenger RNAs, one or more vectors, or a combination thereof.

101. The system of any of claims 77-100, wherein the at least one Cas protein, the at least one transposon-associated protein, and the gRNA are encoded by different nucleic acids.

102. The system of any of claims 77-100, wherein one or more of the at least one Cas protein, the at least one transposon-associated protein, and the gRNA are encoded by a single nucleic acid.

103. The system of claim 101 or claim 102, wherein Cas7 is encoded by an individual nucleic acid.

104. The system of claim 100, wherein a single nucleic acid encodes the gRNA and at least one Cas protein.

105. The system of claim 104, wherein each of the at least one Cas protein, the at least one transposon-associated protein, and the gRNA are encoded by a single nucleic acid.

106. The system of any of claims 77-105, wherein the one or more nucleic acids further comprise or encode a sequence capable of forming a triple helix downstream of the sequence encoding the at least one Cas protein or the sequence encoding the at least one transposon-associated protein.

107. The system of claim 106, wherein the sequence capable of forming a triple helix is in a 3′ untranslated region of the sequence encoding the at least one Cas protein or the sequence encoding the at least one transposon-associated protein.

108. The system of any of claims 77-107, wherein one or more of the nucleic acid encoding at least one Cas protein and the nucleic acid at least one transposon-associated protein comprises a sequence encoding a ribosome skipping peptide.

109. The system of claim 108, wherein the ribosome skipping peptide comprises a 2A family peptide.

110. The system of any of claims 77-109, wherein each of the at least one Cas protein and the at least one transposon-associated protein are part of a single fusion protein.

111. The system of any of claims 77-110, wherein one or more of the at least one Cas protein are part of a ribonucleoprotein complex with the gRNA.

112. The system of any of claims 77-111, further comprising a donor nucleic acid to be integrated, wherein said donor DNA comprises a cargo nucleic acid sequence flanked by at least one transposon end sequence.

113. The system of any of claims 1-112, wherein the system is a cell-free system.

114. A composition comprising the system of any of claims 1-113.

115. A cell comprising the system of any of claims 1-112.

116. The cell of claim 115, wherein the cell is a prokaryotic cell.

117. The cell of claim 115, wherein the cell is a eukaryotic cell.

118. The cell of claim 117, wherein the cell is a mammalian cell.

119. The cell of claim 117 or claim 118, wherein the cell is a human cell.

120. A method for DNA integration comprising contacting a target nucleic acid sequence with the system of any of claims 1-112 or a composition of claim 114.

121. The method of claim 120, wherein the target nucleic acid sequence is in a cell.

122. The method of claim 121, wherein the contacting a target nucleic acid sequence comprises introducing the system into the cell.

123. The method of claim 122, wherein the cell is a prokaryotic cell.

124. The method of claim 123, wherein the cell is a eukaryotic cell.

125. The method of claim 124, wherein the cell is a mammalian cell.

126. The method of claim 124 or claim 125, wherein the cell is a human cell.

127. The method of any of claims 122-126, wherein the introducing the system into the cell comprises administering the system to a subject.

128. The method of claim 127, wherein the administering comprises in vivo administration.

129. The method of claim 127, wherein the administering comprises transplantation of ex vivo treated cells comprising the system.

130. Use of the system of any of claims 1-112 or a composition of claim 114 for integrating DNA into a target nucleic acid sequence.

131. The use of claim 130, wherein the target nucleic acid sequence is in a cell.

132. The use of claim 131, wherein the contacting a target nucleic acid sequence comprises introducing the system into the cell.

133. The use of claim 132, wherein the cell is a prokaryotic cell.

134. The use of claim 132, wherein the cell is a eukaryotic cell.

135. The use of claim 134, wherein the cell is a mammalian cell.

136. The use of claim 134 or claim 135, wherein the cell is a human cell.

The application's sequence listing, which the Patent Office published only in electronic form, follows.

SEQUENCE LISTING (305 sequences)

SEQ ID NO: 1 - protein, 207 aa, Vibrio parahaemolyticus
MKKRIIKNSKVKNISRFVSLKTDSVQTTESDLEFDACFHFEFASHVKSFETQPLGFEYRLNGRLRRYTPDMLCYFNDGYATYYEVKPKWVTERDEFKKKFDAQKQQAIANGYDLLVLTEDDIQTYPLLDNLKIIHRYACSDSLDNVQVRILKLFQNYGEMRISQVINASQGQSASILPALYDLIAKKILEFDWHCPISHDSLVWRVS

SEQ ID NO: 2 - DNA, 624 bp, Vibrio parahaemolyticus
atgaaaaaacgaatcattaaaaactccaaagttaagaacatttctcgttttgtaagcttgaagacagattcagttcaaacaactgaatctgatcttgagtttgatgcatgttttcattttgaatttgcctcacacgtaaaatcatttgaaacacagcctctgggttttgaatatcgattgaatgggcggttacgtcgttatactcctgatatgctctgttatttcaatgatggctatgcgacatattatgaagtgaagcctaagtgggtaactgaacgggatgaatttaagaaaaaatttgatgcacagaaacaacaagctattgctaacggatatgacttacttgttctgactgaagatgacattcaaacttatcctttgctggacaatctgaagatcattcatcgctacgcttgttctgatagtcttgataatgtgcaggttaggatcttaaagttatttcaaaactacggcgaaatgcgaatctcgcaagtaataaacgccagtcaggggcagtctgcatctatattgcctgcgctctatgatttgatcgccaaaaaaatcctagagtttgattggcactgtccaatcagtcatgattctcttgtctggagagtttcatga

SEQ ID NO: 3 - protein, 624 aa, Vibrio parahaemolyticus
MSDDSENLYAFGSFFPEKHSNTSVPKTSKGTRFGIELQESYQDLFSFDEKRRDEAIHRYNILDYLIELHGPSLTLKKISGSMKGLADKFHPNVPSAPSIYRYWTTFKKSGFVLSSLIPGVTRGNTKQRKTLELEEYIERAIKSYFSAESPTIQQAFTLLETEIDRHNECNDTQLSFEYESFRKRIVKKTDYERLLIKKGKKAADTYYKKVGQRPETTRVLQRVEADHTRLDLFVIDDARKLPLGRPWLTLLFDTHTKSVVGFYLGFEPPGYLSVSLALENAILPKYYVKELYPEVKGEWPCYGLPEHLIVDNGAEFNSKDFVTACKNLRIKVKKNPVKKPWLKGSVERYFRTINNKLLSGIPGKSFSNIFARGDYNPQKNAIITRSDLMKVIHVWLIDIYQSSPNGLENNIPNLSWADAMRSAFPPRSFNGSIDELRFNLGKHVEISLDRNGIRLKKTLRYTSSYLAQYFGKHTYDGKSIKVKIKYNPICMGNIYVLDEDKHEFFAVESVDPDYAYSVSEWLHKVCCDYARNHIRNNYRHNDVIKAWRVIYDIIDEALHLSGNGKQANVGIRQASKLERVREHAERTKSHQKPELHMSSNDDIDWDVEVNTDGWKIDSVRGTNK

SEQ ID NO: 4 - DNA, 1875 bp, Vibrio parahaemolyticus
atgagtgatgactctgaaaatctttatgcttttggatcctttttcccagagaaacactcgaatacttcggtgcctaagacatcaaagggcacgcgattcgggattgaactgcaagaaagttatcaagatcttttttcattcgatgaaaaacgcagagatgaggctattcatcgatacaacatattagattatcttattgaactgcacggccctagtttaaccttaaagaaaatatcaggttcgatgaagggtcttgcagataaatttcaccccaatgtaccgtctgcaccatcaatatatcgttattggactacgtttaagaaatctgggtttgtactttcttcgttgattcctggggtaacgagaggtaatacaaagcaacgaaaaaccttggaactggaagagtatatagagagagctataaaatcatatttttcggcagagtcgccaacaattcaacaagcctttacgttattagaaacggaaatagatagacataatgagtgtaatgacacccaattatcttttgaatatgaatcctttagaaaaagaattgtaaaaaaaacagattatgaaagactgctaattaaaaaaggtaaaaaagccgccgatacatactacaagaaagtcggacaacgaccggaaacgactcgggttttgcagcgtgtcgaagcggatcatactcgcctagatttgtttgtgattgatgatgctcgtaaacttcctcttgggcgcccgtggcttacattactttttgatactcatactaaaagtgtcgttggtttctatcttgggttcgagccaccaggttatttatcggtttctctagccctagaaaatgcaattttacctaagtattacgttaaagagttatatccagaagtaaaaggggagtggccatgctatgggttaccagaacaccttattgttgataacggtgctgagtttaatagtaaagactttgtaaccgcttgtaaaaacttacgaattaaggttaaaaagaaccccgttaaaaaaccttggctgaaaggatctgttgaacggtattttcgaactatcaacaataaactgctttctggaatcccaggtaagagcttcagtaatatcttcgctcgcggcgattataatccacaaaaaaatgcgattattacccgttcagatttgatgaaagttatccatgtttggcttatcgatatataccaatctagccctaatggtttggaaaataatatacctaatctttcttgggctgatgctatgcgtagtgcttttccacctcgctcctttaatggttcaatagatgaactaaggtttaatcttgggaaacatgttgagatttctctcgatagaaacggtattcgccttaaaaaaacactgcgttatacaagttcatatcttgctcagtatttcggaaagcatacatacgatggtaagagcattaaggtaaaaataaaatataatcctatttgtatgggcaacatatacgttctggatgaagataaacacgaattttttgccgtagaatcagttgatcctgactacgcttattcagtatcagagtggcttcacaaagtgtgttgcgattatgcacgaaaccatataaggaataactatagacataatgatgttattaaagcctggagagtgatatacgatatcatcgatgaagcactgcacctatctggcaacggtaagcaggctaatgttgggattagacaagcctctaaacttgaaagggtgcgtgagcatgctgagcggaccaaatctcatcaaaaaccagagttgcacatgtcgagtaatgacgatattgattgggacgttgaagtgaatactgatggctggaaaattgattcggttcgaggtacaaataaatga

SEQ ID NO: 5 - protein, 317 aa, Vibrio parahaemolyticus
MNHFARAPHQQVKSIFISNSQIDEILSDIEECREESDGISEPECLIVVGDSGSGKTTIIDKYLVDNPRMEANDGSIIPILFTSLPANANPVTASERLLSSMGDPLAFSHGKDPAELMKIVNDLLRECRVELIIIDEFQHMIDRKSKDVLHSTADWLKMIIIDSKIPVVLFGMPYSTEILRVNNQLRGRFESQHHLKPFRVKDTSELIRYKTFMTMLDAALPFLEESGLASEDIMKRVYIFSKGNMRLIRRLINKAAKFALLENAPCISLKHFARAAPKVSRDACKSFNPFDTDTKKLKIIEPPEDVGWENYLAAKGD

SEQ ID NO: 6 - DNA, 954 bp, Vibrio parahaemolyticus
atgaatcattttgcaagagcaccccaccaacaggtgaagagtatttttattagtaattctcagatagatgaaattctctcggacatagaggaatgtcgagaggagagtgatggtatatcggaaccagaatgtctaattgttgttggtgatagtgggtcaggcaaaaccactattatagataaatatttagtcgacaacccaaggatggaagctaatgatggttctatcattcccattttgttcacttcgttacccgcaaatgccaatccagttaccgcctcggaaaggctgttatcttcgatgggagatccgttagcatttagtcatggaaaagatcccgccgagttgatgaaaatagtcaatgatttgcttcgcgagtgcagagttgaactcattatcatagatgagttccagcacatgattgaccgcaaaagcaaggatgtacttcatagcacagctgactggttaaagatgataatcattgattcaaaaatacccgttgtactttttggaatgccttattcaaccgagattttgcgggtcaacaatcaattacgagggcgttttgaatctcaacaccatttaaagccattcagggtcaaagacacaagtgagctaatcagatacaaaacatttatgacgatgttagatgcagcgttaccctttttagaggaatctggattggcatctgaagacataatgaaaagggtgtatattttttccaagggaaacatgcggttaattcggcgtttgatcaataaagcagctaaatttgctttgctagaaaatgctccgtgtatttctttaaagcattttgcacgtgcggcacccaaagtgagtcgggatgcttgtaaatcatttaacccatttgatacagataccaaaaaactaaaaattattgaaccaccagaagatgttggttgggaaaattatcttgctgcaaaaggagattga

SEQ ID NO: 7 - protein, 396 aa, Vibrio parahaemolyticus
MMLLQRPKSYPDESLESFFIRVANKNGYNDVHWFLVAVKRYLLDIDPRKFQTFPTDICCINPYSSKKHSISRTHALHHLSQLTFNEPVDLLGIALNRNQMQFSPSTTALIRGAEVIPRSLLRKGAIPCCPCCLGEHGYASYRWHFSGYEYCHEHDVKLIERCSCGAIYDYRYAGLSGVCTECGENISASQENHEPKATRIASWLAGDDVKPLPDVPLSYRWGFMHWWSQISSSCKTRNNGEFLAFWEHWPNSFHKLIGKEIDFNFEYCVLSKNDLRVKDILGKILFSSIQLPDRNFRSNIILKEMFQYIETHLWDDNGKLANLRMNMLEICVLLNCSREQVTSMIEQGLLPPNRQLGKREILIVTEYAFYLGDVYCLWLSEFQSDEFNRSFYLSRW

SEQ ID NO: 8 - DNA, 1191 bp, Vibrio parahaemolyticus
atgatgcttttacaacgtccaaaatcttatccagacgaaagccttgaaagtttttttattcgtgtagcaaacaaaaatggttataatgatgttcattggtttttagtagccgttaagcgttatcttttagatatagatccaagaaagttccagacatttcccaccgatatctgttgcatcaacccttactcatccaagaaacattcaatctcgcgaacacacgcattacatcacctcagtcagttaacatttaacgaacctgtagatttactcggtatcgcgttaaacagaaaccaaatgcagttttctccgtcaacaaccgcgttaatccgtggtgcagaagtcattccacgctctcttctacgtaagggggcgattccatgttgtccctgttgtctaggtgaacacggatatgcgagttaccgctggcatttttcagggtatgaatattgtcatgaacatgacgttaagttaatagaacgctgtagttgcggggcaatttatgattaccgttatgcgggattatcaggtgtatgtactgaatgtggggaaaatatatccgcatctcaagaaaaccacgagcctaaagcgaccaggatagcatcttggttagcaggagatgatgtaaaaccattgccagatgtccctcttagttatagatgggggttcatgcattggtggtcccaaatatcaagctcatgtaaaactcgaaacaatggtgagttcttagccttttgggaacattggccaaactcctttcacaagttgattggaaaagaaatagatttcaatttcgaatactgcgttcttagtaaaaacgatttaagagtgaaagacattctagggaagattctgtttagctcaattcagcttcctgaccgtaactttcgttcgaacatcatattaaaagagatgtttcagtatatagaaacacacttatgggacgacaacggtaaactggcgaaccttcgaatgaatatgcttgagatatgtgtattgctgaactgttctcgggagcaagtgacatcaatgattgagcaaggcttactccccccaaatcgtcaacttggaaaacgagagatactcatcgttactgaatacgctttttacttgggtgatgtttattgtctttggctttcagaatttcaatctgatgagttcaatcgctctttttacctgtcgaggtggtga

SEQ ID NO: 9 - protein, 640 aa, Vibrio parahaemolyticus
MATLAEILDNKTDDLNKDLRRAFRPLSAPVDISDTPIEALTILVNLTDRVIEQKNLLDRQKCKDKLRDEKWWANCFRTVKYRQSHNPKFPDIRANGVIRAAPVGHLPACMLSSSKLPKNSWAYANDSSQMNKSCFLTSEFIWNGDVHCLGQLLTELEHPLWNVLRKLGCYVKTAKYISKELALIPPLEINTSLVRNYLAQISLPNGEDSYISLSPVVSQSMQEDCYQVLSEHYRFSAITRFSRATNMGTLAMSCGGKFKMIRSLPPIEKYQHHHLDSVNWLTKRSVRAIRDYTESSVWVISPNKLALRKKSIIGDIKMMLSQWLRTTPTHEEKLDIRKLTERFNVDLAKTKFANRYAYDPLLTQLIYNCIGSIIHSSPQYAPKCEGNDDKYLLLPNLRISGASAMNTSVSIGIPSMMAFYGFVHAFQRNVQTANPNFKIESFAVCIHNIHVENRGLTREWVPNTKGQITAPATRDDWQCDVAVSLILRCSHYSQLIPRDFIRLLPGRIARGKVTVSISDIKHLGRCLSLADAIKAIPVETGRWLSLNNEVTLNSIQDVIDELKNNKLQTVNCIGYHRLETPCEKRGSLHGYKHAFVETILGIIKFLTISENTNPSQYFWQYHYSKQGPILLPRSVSDETS

SEQ ID NO: 10 - DNA, 1923 bp, Vibrio parahaemolyticus
atggcaacactggcagaaatattagataacaaaacagacgaccttaataaagacttaagaagagcctttagaccactctccgcacccgtagacatatcagatactcccattgaagcgctaaccatactagtgaacctaacagatagagtcatcgaacaaaaaaacctacttgatagacagaaatgtaaagacaaacttagagacgaaaaatggtgggccaactgcttcagaaccgttaaatatcgccaaagtcataacccaaagtttcctgacattagagcaaatggcgtaattcgtgccgcaccagtcgggcatttgccagcttgtatgctttcttctagtaaattacccaaaaatagctgggcttatgccaatgactctagccaaatgaataaatcctgttttttaacgagtgaatttatatggaatggtgacgttcattgcttaggtcagttgctcacagagcttgaacatccgctctggaatgttctaagaaaactcggatgttacgttaaaacagccaaatacatatcaaaggaactagcacttattcctccgttggaaattaatacttcgctagttagaaattatctggcacagatttctcttccgaacggcgaagactcatatatttctttatcacctgtggtttctcaatcaatgcaagaagattgctatcaagtattgagtgagcactatcgattttctgctattactcgatttagccgagcgacaaacatgggaactctggcaatgagttgcggagggaaattcaaaatgatccgctctttgcctccgatagaaaagtaccaacatcaccacttagactccgtaaattggcttacaaagcgctcagtcagagctatacgagactacacagagtcttccgtatgggtaatatcaccaaataaactggcacttagaaaaaaatcaatcattggagacattaaaatgatgctttcccaatggctgcgtaccactcccacgcacgaagaaaagttagatataaggaaattaacagaacgcttcaatgtcgatttagccaaaaccaagtttgcaaatcgctatgcttatgatcccctgctaactcagttgatctacaactgtataggttcaatcattcattcatcgcctcaatatgctccaaaatgtgagggaaatgacgacaaatacttgctgctaccaaatcttagaatctctggtgcatcagccatgaatacgtctgtgagtattggaataccttctatgatggcgttttatggattcgtacacgctttccagagaaatgtacaaacagctaatcctaactttaaaattgaaagtttcgccgtatgcattcacaacattcatgtggaaaaccgcggattaacaagagaatgggtcccaaacacaaaaggacaaattacagcacctgcaacacgagacgattggcagtgtgacgttgcagtaagcctgattcttcgttgcagtcattattctcagctaataccacgcgatttcatacgcttattaccgggaagaatagcaagagggaaagtgacagtttctatatccgatataaaacacttaggccgatgtttgagtttggctgatgcaatcaaagcgatacccgttgaaacaggtagatggcttagcctaaataacgaagtgaccttaaacagtattcaagatgtgattgacgagttaaaaaataacaaattacaaaccgtcaactgcattggctaccacaggttagaaaccccatgtgaaaaacgtggctcactacacgggtacaaacatgctttcgtcgaaaccatactcggtatcataaaatttctcacaataagtgaaaatacaaaccccagccaatacttttggcaatatcactattcgaagcaaggtccgattttacttcccaggagcgtatccgatgaaacttcctaa

SEQ ID NO: 11 - protein, 347 aa, Vibrio parahaemolyticus
MKLPNGLSYMKSIEASDVIFLVNWPDGRKTPLPYTSRVALGMKEGSKSAYKDDGQIDADVTAYSLAQGNPHEIDFCCVPYGAESIECEFSVSFASSLRKPFKCSDPEVKRTLVQLIKLYEEKVGWEELANRFLENICNGRWLWRNNECTYSTSIGIKPWPWEDEKAISPFHDIRKNYAGTNHFRDHKDWDNLIKLITDAFSQPNGLCIFEVSATFRLGTNAPIYPSQVFKDSVKGEKNRIYQSTDVDGESSPILGCYKTGAAIATIDDWYPDADKPIRISHYGAHREDVYCYRHPNTGKDLFTLLEKADQYLEQLQATDVLPDEMINDLHFIVANLIKGGLLQQKGT

SEQ ID NO: 12 - DNA, 1044 bp, Vibrio parahaemolyticus
atgaaacttcctaatggcttgtcttatatgaaatctattgaggcttctgacgtcattttccttgttaattggccagatggaagaaagacaccgctcccatacactagccgtgttgcgttgggtatgaaagagggttccaagtctgcatacaaagatgatgggcaaattgacgcggacgtaaccgcatattctctagctcagggtaacccccacgaaatcgacttttgctgtgtaccttacggagcagagagtattgaatgcgaattttctgtttcatttgcttcgagtcttcgtaaaccatttaagtgttccgatccagaagtaaaacgaaccctagttcaattgattaagctatacgaggaaaaggtgggttgggaagaactcgccaataggttccttgagaatatttgtaatggtagatggctttggagaaataacgaatgtacatattctacatcaatcggtataaaaccttggccttgggaagacgaaaaagccattagcccattccatgacatccgaaaaaattatgctggcactaaccacttcagagatcataaagactgggataatctaatcaagttaatcactgacgctttttcccaaccgaatgggctctgtattttcgaagtcagcgctacatttcgtttaggaacaaacgctccaatttatcctagtcaagtattcaaagactctgtcaaaggtgaaaaaaaccgcatctatcaatccactgacgtagatggagagagtagtcctatactcggttgttataaaactggagcggcaatagccacgattgacgactggtatccggatgcggacaaaccaatacgtatcagccactatggtgcacatagagaagacgtttattgttatcgtcacccaaacaccgggaaagatttattcacacttttggaaaaagccgatcaatacctcgaacaacttcaggctacagatgtattgccagatgaaatgattaatgacctgcattttatcgttgcaaacttgataaaaggcgggttacttcaacagaaaggaacctaa

SEQ ID NO: 13 - protein, 198 aa, Vibrio parahaemolyticus
MDWHYRTITFLPEYRNNEAIAAKCIKELHRFNYKYETRSIGVSFPLWGQETVGRKITFVSTNKMELDFLISRRYFVQMTKLGYFSISTTQTVPDDCSYVLFKRAHSIDKGTSAGRARELKRLERRALERGEIFDPIAYSKTTSHAFQSYHSLEEDSSSGNKFRLNIQMKERSGTVGTGKFSSYGLGNTDNSLQVVPLI

SEQ ID NO: 14 - DNA, 597 bp, Vibrio parahaemolyticus
atggattggcactatagaaccatcacatttttacctgaatatcgaaacaatgaagcaatcgcagctaaatgtatcaaggagctccatcgttttaattacaagtacgaaacgagatccattggcgtctcgttcccactctggggccaagaaacggtgggacgtaaaatcacctttgttagtaccaataaaatggaattggattttctgatatcacgaaggtatttcgtacaaatgacaaaacttggttactttagcatttccacaacacaaactgtcccagacgattgttcttatgttctatttaaacgtgcacactctatagataaaggaacatctgcgggccgagcgagggagttaaaacgacttgagcgaagagctttagaacgcggcgaaatatttgaccctatagcttattccaaaaccactagtcatgcattccaaagctaccactcactggaagaagatagcagcagtggcaataagttccgactgaatatacaaatgaaggaaaggtcaggaactgtaggtactggaaaatttagcagctatgggctaggcaataccgataattcattgcaggttgttcctttgatttaa

SEQ ID NO: 15 - DNA, 250 bp, Vibrio parahaemolyticus
tgttgatacaaccataaagtgacatttataattactttaatatcaaagtattagaaaaatacaaccatatgttgatattgcttaatacaaccataagataatttttttgtgacgatatatttgaggtatcaaagcgcagtaagaaactttcttacaaaaatagttccatcacttcacctagtcatgtgtaagtcgacaaagtcgcttggtaattaaggtacgaccgaatcgcttggtgatcacatagaag

SEQ ID NO: 16 - DNA, 250 bp, Vibrio parahaemolyticus
tgtaaatacaaccatacattgcaacaatacaactatatgttgaatcaaaacacctataccttgcattgtataaaaagtgtaccatactttcgaaagtttactacaagtgtggatactttgtatgaaaaaacgaatcattaaaaactccaaagttaagaacatttctcgttttgttagcttgaagacagattcagttcaaacaactgaatctgatcttgagtttgatgcatgttttcattttgaattcgcc

SEQ ID NO: 17 - protein, 206 aa, Aliivibrio sp. 1S157
MYVRTLKQSQVKNISKFMSLKNDSIIRTESMLEFDMCFHLEYSPDVVSFESQPQGFHYEYQGKRLPYTPDFLITHSSGQQQLLEVKPLSKTQRPDFQSKFIQKQQAAQKLNLSLILITEKQIRTGHLLNNFKLLHRYSGLHSISVTQKAIIHLIQKVNKIQINQIANSLNISNGEALTGVLSWLSKGALQTDYSNGVINGNSYVWL

SEQ ID NO: 18 - DNA, 621 bp, Aliivibrio  sp. 1S157
atgtacgttcgtacactaaaacaatctcaagtaaaaaacattagcaaatttatgagcctgaagaatgattcgatcattcgtacagaatctatgctcgagtttgatatgtgctttcatcttgaatattctcctgatgttgttagctttgaatctcaacctcaaggctttcattacgaatatcaaggaaaacgcctcccctatactccagattttctcattacacattcatctggacaacaacaactacttgaagtcaaacctctttctaaaacccaacgtcccgattttcaatcaaaattcatccaaaaacaacaagcagcccagaagttaaatctttcattaatccttattaccgaaaagcaaattagaacaggtcatttactcaataattttaaacttctacatagatactctggactacatagtatttctgttactcaaaaagcaattattcacctcattcagaaagtaaataaaattcaaattaatcaaattgcaaacagcttaaacattagtaacggagaagcattaacaggtgttttaagttggctgtcaaaaggggcacttcaaactgattactcaaatggagtgattaatggcaactcgtatgtgtggttataa

SEQ ID NO: 19 - protein, 614 aa, Aliivibrio  sp. 1S157
MSFPFNDEFQEIIEVSGEQNKIIHNEETNSLLLSLDSYSHNIKMEVLRRISFIKWIKPRLKGGWTQKNLNPLLDDAATQLKMIAPNWRTLAEWHKNYHSSGNDISSLIPKHSSKGNIQQHTDSDFLIMKAINEKYLTLTRCSISQTFKYYCDLVIIENRSLPEKKIKSVSQRTFYNRINALPKYDVTLKQYGKRYADINYRTVDRMVNVTRPLERVEIDHTPLDLILLDDNLEIPLGRPYLTILIDSYSKCIVGYNLSFRPPSFESIRHAFCNACLDKSSITQQYPHLQQDWPISGKIENLVVDNGAEFWSNSLEDSLRPFATNILFNKVGKPWMKPLVEKFFDVLNKGLVHSLPGTTRSRIEQLKGYNPKKDAAITFSLFLELFHTWIIDIYHMSSDTRETAVPYFKWQEGVTALPPLTYTDEEAQQLRIELGILNTRTVRIGGIFLYGLRYESEELNEYRKIWGAIDKNNLTLKTKTDPSDISNIFVYLTNESRYIKVPCITDISYTSGLTLFQHQTAQKLQRTKTRLQIEHEKLADSRIYVENRIAEEVEKIKSSKKRTTKTTHASKIARHQDIGSHTQKSIQIPNEQSDTKNEHDVLNGWDEQFDDLEGF

SEQ ID NO: 20 - DNA, 1845 bp, Aliivibrio  sp. 1S157
atgagttttccatttaacgatgaatttcaagagattatcgaggtttctggcgagcaaaataaaatcattcataatgaagaaacaaactcccttctattatcccttgattcatatagtcataacataaaaatggaagtactacgccgtatttcctttattaagtggatcaagccacgtttaaaaggtggctggacacaaaaaaacttaaatcctcttcttgatgatgcagctacacaattaaaaatgatagcccctaactggcgaactcttgctgagtggcataaaaattaccattcaagcgggaatgacatctcctctttaatcccaaagcactcaagtaaaggtaatattcaacagcatactgatagcgattttttgataatgaaagcaattaacgaaaaatacttaacactaacccgatgctctatcagtcaaacttttaagtactattgtgatttagtaataatagaaaaccgttccttgcctgaaaagaaaatcaaatctgtcagtcaacgtactttttacaaccgaatcaatgcactacctaaatatgatgtgactttaaaacagtatggtaaacgatatgctgatattaattaccgaaccgtagatagaatggtaaatgtaacaagacctttagagcgagtagaaatagatcacacacctcttgatttaatcttactggatgacaacttagagataccattaggtcgtccatacctaacaattttaatcgacagttatagcaaatgcattgtcggctataaccttagtttcaggcctcctagctttgaatctattcgtcacgctttttgcaatgcctgccttgataaatcatctattacacaacaataccctcaccttcaacaggattggcctatttccggaaaaattgaaaatcttgttgtagataatggtgctgagttctggagtaacagtttagaagatagcctacgccccttcgctaccaacattttatttaataaagttggtaagccgtggatgaaacctcttgttgaaaaattttttgatgtattaaataaaggcttggtgcattcacttcccggaacaactcgctcaagaatagaacaactaaagggatataaccctaaaaaagatgccgcgattacattcagtctatttttagaactatttcatacgtggattatcgacatctatcacatgagttccgatacaagagagactgctgttccttactttaaatggcaagaaggagtaacagccttaccccctctcacctatacagatgaagaagcccaacaattacgaattgaacttgggatattaaatactcgaactgtacgtattgggggtattttcctttatggattacgttatgaatcagaggagctaaatgaatacagaaaaatttggggtgcgattgataagaataacctaacgctgaaaacaaaaaccgatccttctgatatatcaaatatttttgtctatttaactaatgaatctcgctatattaaagttccttgcataacagatattagctatacatcaggccttacgttatttcagcatcaaacagctcaaaaattacaaagaactaaaacaagattacaaatagaacatgaaaaactcgctgattcacgtatatatgttgaaaatagaattgcggaagaagtagaaaaaatcaaatctagtaaaaaacgtactacgaaaactactcatgcatcaaagatagctcggcaccaagatattggtagtcatactcaaaaatcgattcaaatacctaatgagcaaagcgataccaaaaatgaacatgatgttttgaatgggtgggatgaacaatttgatgatttagagggattttga

SEQ ID NO: 21 - protein, 336 aa, Aliivibrio  sp. 1S157
MHTLSSTQKEQLISFNQCFIEYPIITHIYSIFDDLRMNQGLGAEPQCMLLLGDTGSGKSALINNYLLQQPPSNFSALSSLPVLHTRIPRRVNNEQTMYQLLTDLGQSPSGSRRAKRSEIALAEGVVRALQRKKTELIIINEFQELIEFSSAKERQNVANTLKYISEEARVSIVLVGMPYADIISEEPQWGSRLAWKTQIEYFSLKNDMKTYVQFLKGLANRMGYDEVPSLHNKEFAIPLFSICRGELRQLKNFCSDAMLESFKQNKNTLTHDVLSATFKYKYPTKKNPFEMNVADIPIQEVESYSKYNLNAMTDDERLTATKFLDAMSLSSLLSKS

SEQ ID NO: 22 - DNA, 1011 bp, Aliivibrio  sp. 1S157
atgcacactttatcttcaactcaaaaagagcaactcatcagctttaatcaatgctttattgagtatccaataattactcatatctactctatttttgatgatttacgaatgaatcaaggtttaggtgcagaaccgcaatgtatgctcttacttggtgatactggctcaggaaaatcagcactcattaataactacctgttacaacaaccgccatcaaatttttccgcactcagttcattacccgttttacatacacgtatcccacgtagagtgaataacgaacaaaccatgtatcagttgttaactgacttaggacaatcaccttcaggttcgagacgtgcaaagcgatctgagatcgctctcgctgaaggagtagttcgagctttacagcgtaaaaaaacagaactcattattattaatgaatttcaagaactcatcgaattttcaagtgctaaagaacgtcagaatgtcgctaacacgcttaaatacattagtgaagaagctagagtatccattgtgttagttggtatgccctatgcagatattatttctgaagaacctcaatggggatctcgcttagcatggaaaacacaaatagaatatttttcattaaaaaatgacatgaaaacctatgttcaattcctaaaaggcctagcaaatcgaatgggatatgatgaggtgccatcactacacaataaggagtttgctattccactgttttcaatttgtaggggtgagctaaggcaactcaagaacttctgctctgatgcgatgctagaaagttttaagcaaaacaaaaacacattaactcatgatgttttaagtgccactttcaaatacaaatacccaacgaagaaaaatccatttgaaatgaatgtagctgacattccaattcaagaggtagagtcttattcaaagtataatctaaacgcaatgactgatgatgaacgccttactgcaactaagtttctcgatgctatgtctttatcttcactattgagtaagagttaa

SEQ ID NO: 23 - protein, 399 aa, Aliivibrio  sp. 1S157
MLNPIELYEDESLESCLLRISQNNYYDSFQDFSDEVWFQVKEEDREVRGTFPATLNTINLYHSHTSSNLKLKVLIKIEQWLEINNFPLLKSALSRSSNTFLRQHSAVFRNGVDIPRILLRKNGIPVCPECLKENEYIRQEWHFITHDVCTKHKTDLLHYCPECKTSINYQESENITDCQCGFKFSDHLAPQANSNALLIAQWLNSENTKLANVWGEHQAISSRFGVLLWYINRYNLTDDFSTSFVKYSLNWPTNFYSELDEQIDKAKTVQIKPFNKIFFNEIFNSLLLDCRHLPTREFKTNSILSHIYQYFLSRYQIQPNSDVFSILLSPLEASSLLSCTTDQIYRLYELGFLKLGVRPKLHQKIASHQSVFTLSSIILVKLSNMQSSQDELHHYLSAW

SEQ ID NO: 24 - DNA, 1200 bp, Aliivibrio  sp. 1S157
atgcttaatccaatagagctttatgaagatgaatcgctagagagctgtttattaagaatcagtcagaataattactatgattcttttcaggattttagcgatgaagtttggttccaagtcaaagaagaagatcgtgaggttcgtggaactttccctgcaaccctaaatacgataaatctctatcactctcacacatcaagtaacttaaagctcaaagtactaatcaaaattgagcagtggcttgagattaataacttccctttattaaaaagcgccttgagcagatcaagcaatactttcttacgccaacattctgctgtttttagaaatggtgttgatataccaagaatcctgctcagaaaaaatggtattccagtatgccctgagtgcctaaaagagaacgaatacatacgtcaagaatggcacttcatcactcatgatgtatgcaccaaacataaaacagatctattacattactgcccagagtgtaaaacctctattaattatcaagaaagtgaaaacattacggattgtcagtgtggattcaaattcagtgatcacttagctccgcaagcaaatagtaatgctttactcattgcacaatggcttaacagcgaaaacactaagctggctaatgtttggggagagcaccaagcaatatcatctcgctttggtgtcttactttggtatatcaatagatataatctaacggatgatttttctacttcatttgtaaaatattcattaaattggcctactaatttctattccgaactcgatgagcaaatagataaagctaaaacagttcagattaaaccttttaataagatattttttaatgaaattttcaatagtcttttattagattgccgacacttgcctactcgcgaatttaaaactaattccatattgagtcatatatatcagtactttctatctcgctatcaaattcaacctaactctgatgttttctcaatcttgctaagccccttagaggcatcgagcttgctttcttgcactaccgatcaaatctatcgtttatatgaattaggttttcttaagttaggcgttaggccaaaactgcatcaaaaaatagcaagtcaccaatcagtttttacactctcaagtattattctagtcaaactttcaaacatgcaatccagtcaagatgaattgcatcactacctttcagcgtggtaa

SEQ ID NO: 25 - protein, 690 aa, Aliivibrio  sp. 1S157
MEFTDILIIQDVKERNRAFKVAFAHYSSAICIDDHEIEAITCLLNLCTPKTEDYLDKTSASLFLNNHDNIQKCLDELKWFHSHNVKYPDCRVKGRNIISLPIDSVNNTINSNVVPYRLGWSHDSGKVNYTHFLLSCFKWRGKQTTLSQLFVTDTLFWLDIIKKIQCNWTKKQAEQFIHSIQKEIPAKTLPENISPYSKQILFPYKNDYLTLTPVTSNSVQTWLEHQSRKPNDIRWIKRESKHPASVGALSSSIGGYHSLIFSPPSTSQSPHSYHDNMTSKTECREAFCASAITEKSTTDALQRLISSEVRMNVKHRKQIRKSGVHFIRQKIALWLTPLIRWRDHIDNNQIQITNDHPSLVNLFLSSPIANFPDLLTPLHNHLNQTLGKNKYTKRFAYHPDLMPIFKSQLSWVLNKLAQDKNINQQPALPRTQFIHLKNLRLYNGNALSSPYVCGLPSLTGFWGFMHDFERRLKTKIEENIHFEAFSLFVHQYELQSSPPLCEASDVYKKRELSPAKRLLTQPSYSCDMRFDLIIKVHTEVNLSDISQRMLSAMPARCVGGTLHQPSLHESLEWLTSYVSSEHLFEELARLPNSGRWIYPPSETFNTPDEFLSILENSTHLAICNGYSFLEDPTNRENVSLNQHVFCEPLIGLAEQVIPIDMRLNRQKHYFSNAFWSINSDFNSILIQKHE

SEQ ID NO: 26 - DNA, 2073 bp, Aliivibrio  sp. 1S157
atggaatttacagatattctcatcattcaagatgtaaaggaacgcaacagagctttcaaggttgcatttgctcactactcttcagctatttgtattgatgatcatgaaatcgaagcgattacatgcctacttaatttgtgtacgccaaaaacggaggattacctagacaaaactagcgcatctctgtttttaaataatcatgataatattcaaaagtgtcttgacgaactcaagtggttccatagtcacaatgttaagtatccagattgccgagttaaagggcgaaacattatttctctaccaatcgattcagtaaataacacaataaacagtaatgtagtcccttatcgattaggttggtcccatgacagtggaaaggtcaactatactcattttctactctcttgctttaaatggagaggaaaacaaacaactcttagtcaattattcgtaaccgacacgctgttttggttagacatcataaaaaaaatacaatgtaactggaccaagaaacaagctgagcaatttattcattccatacaaaaagaaatacctgcaaaaacacttccagagaacatcagtccatattcaaaacagatcttatttccatataaaaatgactatctaactttaactccagtaacttctaattcagttcaaacatggttagaacaccaatctaggaaacctaatgatattcgctggattaaacgagaaagtaagcaccctgctagtgtaggcgctttatcatcttctatcggtggataccatagcttaatattttcgccaccaagcacatcacaatcaccacactcgtatcacgataatatgactagcaaaactgaatgtagagaagccttttgtgcttcagctatcactgagaaaagtacgactgacgcattacaaaggctcatcagttctgaagtaagaatgaatgtgaaacatagaaaacaaatcagaaaatcaggagttcatttcattagacaaaaaatagctctttggcttactcctctgattcgatggcgagatcatatagataataaccagatacaaatcactaatgaccatccatcattagttaacctattcttgtcgtctcctattgctaattttcccgacttattaacgccattgcataatcacctaaatcaaactctaggaaagaataaatacacaaaacgctttgcttatcaccctgatttaatgcctattttcaaatcacaactttcatgggttctgaataaactggcacaagataaaaatataaatcagcagccagcccttccaaggacccaatttatccatcttaaaaatttaaggctatacaatggcaatgcgttaagctccccctatgtttgtggactaccttcactaactggtttttggggatttatgcatgactttgaacgaagattaaaaacaaagattgaagagaacattcattttgaagccttcagcctatttgttcatcaatatgaattacaatcatctcctccgctctgtgaagcatcggatgtttataaaaaaagagaactatcacctgcaaaacgtttattaacgcaaccttcttattcttgtgatatgcgttttgacctcattatcaaagttcacactgaggttaatttaagcgatattagtcaacgtatgctatcagcaatgcctgctcgttgtgttggtggcacgttacatcaaccttcgttacatgaaagtttagaatggcttacaagctatgtatcttctgaacacttatttgaagagttagctcgccttcctaactcaggtcgctggatatacccaccatcggaaacatttaacactccagatgaatttctttctatattggaaaatagcacacaccttgctatttgtaatggttattcatttcttgaggacccaacaaatagagagaatgtgagccttaatcaacacgtattttgtgaacctttaattggattagcagagcaagtaatacctatagatatgagacttaaccgacaaaaacattatttttcaaatgctttttggtcgatcaatagtgatttcaattctattcttattcaaaagcatgagtaa

SEQ ID NO: 27 - protein, 344 aa, Aliivibrio  sp. 1S157
MKLCNNLNYTRSLSPGKAVFYYESKDGQMNPIKCEQTHLRAPKAGFSEAFNSDYSTKNTAPQDLSFSNPQFIEECYVPVGIDEIKIRFSLRIEANSLQPDKCSDIQIREILQAFATKYKENGGYQELGERYAKNLLSGTWLWRNEHNLGTSILIKTTSNQEFNIDDAFKLSRKASAKDKKTISKLGSEIAIALSEPDHYYFADITATINVAFCQEIYPSQEFLDTKEKGKPSKVYAKTSLLTGEKTVALHAQKIGAAIQLIDDWWADDADIPLRVNEFGADHHNIIARRHPSHRNDFYTLIQNADNYCAQLDENSDITDDMHYVMAVLVKGGLFQKSASSKKGK

SEQ ID NO: 28 - DNA, 1035 bp, Aliivibrio  sp. 1S157
atgaagctttgtaataatctaaactacactcgatcattgtcaccgggaaaggctgttttttattatgaaagtaaagatggtcagatgaatcctattaagtgtgagcaaactcatttaagagcgcctaaagctggattttcagaagcctttaatagcgattactcaactaaaaacactgccccacaagatctctcctttagtaaccctcaatttattgaagagtgttatgttcctgttggtatagatgaaatcaaaatccgattttcattacgtatagaagcaaattcattacaaccagataaatgctctgatattcaaattagagagatattgcaagcctttgccaccaaatataaagaaaatggcggctatcaagaacttggtgaacgatacgcaaaaaacttactttctggtacttggctatggcgaaatgagcataatctaggtacaagtattttaataaaaacaacaagtaaccaagaatttaatatcgatgatgcctttaagctatcaagaaaagcctcagctaaagataaaaaaacaatatcaaagttaggaagtgaaatcgccattgcactatctgaacctgatcattattactttgccgatattacggcaacgatcaatgtagccttttgccaagaaatttatcctagccaagagtttttagatactaaagaaaaaggtaaaccaagcaaagtgtatgcaaaaacgtcacttctaactggtgagaaaaccgttgctttacatgcacaaaagattggagctgcaattcaacttatcgacgattggtgggctgatgatgccgatattcccttgagagtaaatgagtttggtgctgatcatcacaatatcatagccagaaggcatccctcacatcgcaatgacttttacaccttaattcaaaacgctgataactactgcgcgcaactggatgaaaattcagatattactgatgatatgcattacgttatggctgtattagtaaaaggaggactgtttcaaaagagtgcttcttcaaaaaaaggaaagtag

SEQ ID NO: 29 - protein, 213 aa, Aliivibrio  sp. 1S157
MLTHYFSITYVPDDCDNELLAGRCIAEFHKFISSLRLIENNSFAIGFPNWSEQSVGNEFAIFSNNSELLSAIKYQPYFNLMKNEELFSITDIKPVPNNLPQIRFIRNQSIGKIFIGSKKRRIQRSITRNNKEHTPISNEDREFDTFHKVSCSSKSKQQQFILHIQKGIIPRTTDSSNSYNSYGLATNNKHLGTVPDLSKIPFYYEDKLSNKDQ

SEQ ID NO: 30 - DNA, 642 bp, Aliivibrio  sp. 1S157
atgctcactcattattttagtattacgtatgtgcctgatgattgtgataatgagttattggcaggacgttgcatcgctgaatttcacaagtttatctctagtctaaggctgatagaaaacaactcttttgccattggcttcccaaattggtccgaacaaagtgttgggaatgaatttgctattttttctaataactctgaattattaagtgccattaagtaccagccctatttcaatttaatgaagaatgaggaattattttctattacagacatcaagcctgtgccaaataatcttcctcaaataagattcatcagaaaccaatctattgggaaaatatttataggttcaaaaaaacgtagaatccagcgttcaatcacaagaaataataaagagcatacacctatatcaaatgaggacagagagtttgatacctttcacaaagtgtcgtgctctagtaaaagtaaacagcaacaatttattcttcatattcaaaaaggcatcatcccgaggactacagactctagcaatagctacaatagttatggcttagcgacaaataataaacatttaggcactgttcctgatttatcaaaaatacctttttattacgaggacaaattatcaaataaagatcagtaa

SEQ ID NO: 31 - DNA, 250 bp, Aliivibrio  sp. 1S157
tgatgcttgcaacataagtctgcatagccctcatctaaaaatcaagagcttaattttgagtttgcagcataagattacatagctttgcagtgatagtctgcaaaatgttttaccttaaaatatgactgtaattttagtatgtaattaaatttcacttattgttaacaaatttaattaatatttagacatgaacgtgctacttctggttctaatacggcagttatgtatatttgataactactaaatttag

SEQ ID NO: 32 - DNA, 250 bp, Aliivibrio  sp. 1S157
tgatgcttgcaaaattactctgcataaattgcaaagaagtctacaaatttgcaaaataagcctgcataaactacctttagttgtaagtttacaacatagaggtgaatatcatgtacgttcgtacactaaaacaatctcaagtaaaaaacattagcaaatttatgagcctgaagaatgattcgatcattcgtacagaatctatgcttgaatttgatatgtgctttcatcttgaatattctcctgatgttgt

SEQ ID NO: 33 - protein, 209 aa, Pseudoalteromonas sp. S983
MYIRNLRKPSPNKNVFKFASTKVSSVVMCESSLEFDACFHHEYNDLIESFGSQPEGFKYEFMGKSLPYTPDALISYTDKTQKYHEYKPYSKIASPLFRAEFAAKRAASLKLGIDLVLVTDRQIRVNPILNNLKLLHRYSGVYGISGIQKELLSFIHKSGVIKLNDISSQVGIPIGETRSFLFGLMHKGLVKADLGCDDLTNNPTLWATP

SEQ ID NO: 34 - DNA, 630 bp, Pseudoalteromonas sp. S983
atgtatatacgcaacttgagaaagccatctccaaataaaaatgtatttaaatttgcgagcactaaagttagtagtgtagttatgtgtgagagttcattagagtttgatgcatgttttcatcatgaatataacgatttgatagagagttttgggagtcagcctgaaggctttaaatatgagtttatgggtaaaagtttaccttacacaccagatgcactgatttcatatacagataaaacccaaaaataccacgaatataagccctattctaaaattgcttctccactatttagagctgaatttgctgccaaaagagctgcatcattaaaattggggattgatcttgttttagtaactgataggcaaattagggtaaatccaatattaaacaacttaaagttattacaccgctactcaggtgtttatggtatcagcggcattcaaaaagagttgctcagttttattcataaatcaggggtaatcaagctaaatgatataagctctcaggttgggataccaattggtgaaacacgatcttttttatttgggctcatgcataaagggttggttaaggctgatctagggtgtgatgatttaactaataatccaacattatgggctacaccatga

SEQ ID NO: 35 - protein, 613 aa, Pseudoalteromonas sp. S983
MTDFFNEFDESLVPLKPQTPTQYVKLDDANLIQRDLDTFSDTFKNQALQRYKLISTIDKKLSRGWTQRNLDPILDELFKGGDVVRPNWRTVARWRKKYIESNGDIASLADKNHKMGNRTNRIKGDDKFFDKALERFLDAKRPTIATAYQYYKDLIVIENESIVEGKIPIISYNAFNKRIKAIPPYAVAVARHGKFKADQWFAYCAAHVPPTRILERVEIDHTPLDLILLDDELLIPIGRPYLTLLIDVFSGCVLGFHLSYKSPSYVSAAKAITHAIKPKSLDALNIELQNDWPCFGKFENLVVDNGAEFWSKNLEHACQSAGINIQYNPVRKPWLKPFIERFFGVMNEYFLPELPGKTFSNILEKEEYKPEKDAIMRFSTFVEEFHRWIADVYHQDSNSRETRIPIKRWQQGFDAYPPLTMNEEEETRFSMLMRISDSRTLTRNGFKYQELMYDSTALADYRKHYPQTKETVKKLIKVDPDDISKIYVYLEELESYLEVPCTDPTGYTDGLSIYEHKTIKKINREVIRESKDSLGLAKARMAIHERVKQEQEVFIESKTKAKITAVKKQAQIADVSNTGTSTIKVSEESAAPVQKHISNDNSDDWDDDLEAFE

SEQ ID NO: 36 - DNA, 1842 bp, Pseudoalteromonas sp. S983
atgactgacttttttaatgaatttgatgaaagcctggtaccattaaagccacaaacgcccacacaatacgtcaaattagatgatgccaacttaatccagcgtgatttggataccttttcagatacctttaaaaaccaagcactacaaaggtataagctaattagcactatagataaaaaactttcacgcggctggacccaacgaaatttagatcctattttagatgagctttttaaaggaggtgacgtagttcggccaaattggcgaactgttgctcgttggcgcaaaaaatatatcgaaagcaacggtgatatagcctcccttgctgataaaaaccacaaaatgggaaacagaactaaccgtataaaaggggatgataaattttttgataaagcattagaacgatttttagatgctaaaagacctactatagcaactgcatatcagtactataaagaccttattgttattgaaaatgagagtattgtcgaaggcaagattccaataatatcctacaatgcgtttaataaaagaatcaaagcaatacccccatacgcggtcgcggtcgcaaggcatggtaaatttaaagcagaccaatggtttgcttactgcgctgcgcacgtacccccgacaagaatattagagcgtgtagagattgatcatacaccacttgatttaatcctacttgatgatgagttacttattcccataggaagaccttacctaacattacttattgatgtatttagtggctgtgttcttggttttcatcttagttataaatccccttcctacgtatctgctgctaaggctattactcatgcgattaaaccaaagtctcttgatgctctgaatatagaactacaaaatgattggccttgctttggtaaatttgaaaatttagttgtagataatggtgctgagttttggtctaaaaacttagagcatgcttgtcagtcagcaggaataaatatccaatataaccctgtgcgcaagccttggctaaaaccctttatagagcgtttttttggggtgatgaatgaatatttcttacctgaattaccaggaaagacattttcaaatattttagaaaaagaagagtataaacctgagaaagatgcaattatgcgcttctcaacttttgttgaagaatttcaccgctggatcgcggatgtgtatcatcaagacagtaattcacgtgaaactcgaatcccaattaaacgttggcaacaagggtttgatgcatatcccccattgaccatgaatgaagaggaggaaacgcgtttttcaatgttaatgcgcatctcagactcaagaacgttaacgagaaatgggtttaaatatcaagagttaatgtatgactcaacagctttggctgattatcgtaaacattatccgcaaacaaaagaaactgtaaaaaaactgattaaagtagaccctgatgacatctcaaaaatttatgtttatttagaagagttagaaagttatctcgaagtaccgtgtacagatcctaccggctatacggatggtttaagtatctatgagcataaaacaataaaaaaaattaacagggaagtcatacgggaatctaaagatagtttgggcttagcgaaagcacgcatggctattcatgagcgagtaaagcaagagcaagaagttttcattgaatcaaaaactaaagctaagataacagctgttaaaaagcaagctcaaatagctgatgtaagtaatacaggaacgagcactattaaggtttctgaagaaagtgcagcccctgtgcaaaaacatataagtaacgataattctgacgactgggatgatgacttagaggcatttgaatga

SEQ ID NO: 37 - protein, 333 aa, Pseudoalteromonas sp. S983
MNALTEIQIEKLRNFSDCIVMHPQIKTIFNDFDELRLNRKFQSDQQCMLLIGDTGVGKSHTINHYKKRVLATQNYSRNTMPVLVSRISRGKGLDATLVQMLADLELFGSSQIKKRGYKTDLTKKLVESLIKAQVELLIINEFQELIEFKSVQERQQIANGLKFISEEAKVPIVLVGMPWAAKIAEEPQWASRLVRKRKLEYFSLKNDSKYFRQYLMGLAKKMPFDVPPKLESKNTTIALFAACRGENRALKHLLLEALKLALSCNEYLENKHFITAYDKFDFFNDKEKLKSKNPFKQDIKDIEIYEVIKNSSYNPNALDPEDMLTDRVFAIVK

SEQ ID NO: 38 - DNA, 1002 bp, Pseudoalteromonas sp. S983
atgaatgccttaacagagatacagatagagaagcttcggaactttagcgattgcatcgttatgcacccgcaaattaaaacaatttttaatgactttgatgaattaagattaaaccgtaaatttcagtcagaccaacagtgtatgctattaattggtgatacaggtgttggaaaaagtcataccattaatcactacaaaaaaagagttctagctacacagaattatagtcgaaacactatgccagtcttagtaagtcgtatatctagggggaaaggcttagatgctactttagtccaaatgctggcagatctggagctatttggaagtagtcaaattaaaaagcgaggctacaaaacagaccttactaaaaagctcgtagagagcttaattaaagctcaagtagagctactcatcattaatgagtttcaggagttaatagagtttaaaagcgtacaagaacgacaacaaattgcaaatgggttaaagtttattagtgaagaggccaaagtgccaatagtactggttggtatgccttgggctgcaaaaatagctgaagaacctcaatgggcttctcgcttagttagaaaaagaaaacttgaatactttagcctaaaaaatgacagcaagtactttcgccaatatttgatggggttagctaagaaaatgccatttgatgtacctcctaagctcgaaagtaaaaataccacaatagcgttgtttgctgcatgtcgaggtgagaatcgagcccttaaacatctactgttggaggctttaaaattagcactaagttgtaatgagtatcttgaaaataaacattttattactgcttatgacaagtttgatttttttaatgataaggaaaaactaaaatcaaaaaatccttttaaacaagacattaaagatattgaaatttatgaggtaatcaaaaactcatcttataacccaaatgcattagacccagaagatatgctcacagatcgagtgtttgcaatagtaaagtaa

SEQ ID NO: 39 - protein, 409 aa, Pseudoalteromonas sp. S983
MAFLFSPKARAFSDESLESYLLRVVSENFFDSYEGLSLAIREELHELDFEAHGAFPVDLKRLNVYHAKHNSHFRMRALGLLETLLDLPRYELQKLALLKSDIKFNSSVALYNNGVDIPLRFIRHHAEEAVDSIPVCSQCLAEEAYIKQSWHIKWVNACTKHQCALLHNCPECYAPINYIENESITHCSCGFELSCASTSPVNTLSIEHLNKLLDKGERNDSNPLFNNMTLTERFAALLWYQERYSQTDNFCLNDAVNYFSKWPAVFNTELDELSKNAEMKLIDLFNKTEFKFIFGDAILACPSTQKQSESHFIYRALLDYLVTLVESNPKTKKPNAADLLVSVLEAATLLGTSVEQVYRLYQNGILQTAFRHKMNQRINPYKGAFFLRHVIEYKTSFGNDKARMYLSAW

SEQ ID NO: 40 - DNA, 1230 bp, Pseudoalteromonas sp. S983
atggcttttctattttctcccaaggctcgggcattttctgacgaatcgctggaaagttacttgttacgggtcgtttcagagaatttttttgactcgtatgaagggctcagcttagctattcgcgaagagctgcatgagcttgattttgaggcgcatggtgcattcccagtagatttaaagaggctcaatgtttaccacgccaaacataatagccattttaggatgcgggctttaggactactcgaaacactactagatttacctcgatacgagctacaaaagttggctttgctaaagtcagatattaaatttaactcctccgtcgctttatataacaatggcgtagacattcccctgaggtttattcgtcaccacgccgaggaagctgttgattcgattccggtatgctcacaatgtcttgcagaagaagcctatataaaacaaagttggcatataaagtgggtaaatgcatgcactaaacatcagtgtgctttgctacataactgcccagaatgctacgctccaattaactatatcgagaatgagtcaattactcattgttcatgcggttttgagctgtcttgcgctagtacctcgcctgtaaatacgttaagtattgaacatttaaataaattactggataaaggtgagcgcaacgatagtaacccgctatttaacaatatgactcttacagaacgttttgctgcgcttctttggtatcaggagcggtattctcaaacagataacttttgtttaaatgatgctgtgaactattttagtaaatggccagcagtttttaatacagagcttgatgaactaagtaaaaatgcagaaatgaagttaatagatctgtttaataaaactgagtttaagtttatttttggggatgctattttagcttgccccagtactcaaaagcagagtgaatctcactttatttatagggctctattagattatttagttactttagttgagagtaaccctaaaactaaaaagcccaacgcagccgacttattagtaagtgtattggaggctgcaactttattaggtacttcagtagagcaggtttataggttgtaccaaaatggtattttgcaaacggcatttcgtcataaaatgaaccagcggatcaacccttataagggcgcgttttttttaagacatgttatagagtacaaaaccagttttggaaatgacaaagctagaatgtatttgtcggcatggtga

SEQ ID NO: 41 - protein, 695 aa, Pseudoalteromonas sp. S983
MHLKELLEITDTTERDRSLRRAFSPYTAMIDITGSEAVALIILLNLTYRKNQVDDLLDKKLAKQALKSEDHINKCIKEIAWFHTHNLKYPDIRVSKQNLAVEPPTLHSYVLSSANYPKAYGWSHNSAKVNFAKLFVSYFKWQNQVSWLAQVLATNSDNWKSAFTSLGLSVKAFKSLCVTVKNSLPEEAIPDSVDRYSRQIRMPYHDGYLAVTPVISHVVQSKIQQAAIDKRARFSNVEFTRPAAVSMLAASLGGVINVLNYPPYIRSKYHGLSNSRAFKLNNGQTVFNVEALLKPELIKALEGIIFSNNALALKQRRQQKVKNIKELRNTLLEWFSPVFEWRLDAIENGYDLEQLESASERLEYKILSLPDNELPSLTIPLFRLLNEMLGGVSMTQRYAFHPKLMSPLKAALQWLLVNLTDQKHVLIEEDDEHYRYLHLSGIRVFDAQALSNPYCSGIPSLTAVWGMIHSYQRKLNEALGTNVRFTSFSWFIRNYSAVAGKKLPELSLQGAQQSRLKRPGIIDGKYCDLVFDLIIHIDGYEDDLQAVDSKPDILKAHFPSNFAGGVMHQPELNSNINWCCLYSNENQLFEKLRRLPLSGCWVMPTEHKIQDLDELLLLLNSDSKLSPSMMGYMLLTEPMARVGSLERLHCYAEPAIGVVKYEAATSVRLKGIGNYFNSAFWMLDAQEKFMLMKKV

SEQ ID NO: 42 - DNA, 2088 bp, Pseudoalteromonas sp. S983
atgcatcttaaggaactgctagagattacagacaccactgagcgggataggtcattacgtcgtgcttttagcccttatacggcaatgattgatataacaggcagcgaagccgttgccctgattattttgttaaacctgacttatcgaaaaaaccaagttgatgacttgctggataaaaagctcgcaaaacaggctttaaaaagtgaagaccatattaataaatgtattaaggaaatagcgtggtttcatactcataatttaaagtaccctgacattagagtcagtaagcaaaatttagccgtagagcctccaacactgcactcttatgttttgagtagtgctaactatcctaaagcctatggctggtcacataactcagctaaagttaattttgctaaattatttgttagttactttaaatggcaaaatcaagtcagttggctggcacaagtattagctacgaactcggataactggaaatccgcatttacctctcttgggttatccgttaaggcatttaaaagtttatgtgtaaccgttaaaaattcattgcctgaagaggccattcccgactctgttgaccgctactctcgccaaattagaatgccttatcatgatggttacttagctgttacgcctgtaattagccatgttgttcaatcaaaaattcaacaggcggcaattgataaacgagcccgatttagcaatgtagagtttacgcgtcctgctgctgtcagtatgttagctgcttccttaggtggtgttattaatgtgcttaattaccctccttatatacgaagtaaatatcatggtttaagtaactcacgagcatttaaattaaataatgggcaaacagtatttaacgttgaggcactattaaagccggaattaattaaagccttagaaggtattatatttagtaataatgcgctggctcttaaacagcgtagacaacaaaaagtaaaaaatattaaagagctgagaaacacgcttttagaatggttttcacctgtatttgaatggcgcttggacgctattgagaatgggtatgacttagaacagcttgagagtgcttcagagcgactagagtataaaatactatcgctacccgacaatgaactcccttcgctaacgattcctttatttaggttactaaatgaaatgcttggcggtgtgagcatgacacaaaggtatgcttttcatcctaaattaatgagccctttaaaagcagctttacaatggttgcttgttaatcttacagatcaaaaacatgtactgattgaagaagatgatgaacattatcgctatcttcatttaagcggtatacgtgtgtttgatgcgcaagcattatcaaacccttactgctcaggtattccatctttaaccgctgtttggggtatgattcacagctaccaaagaaaacttaatgaggcgctaggaacaaatgtacggttcacatccttttcttggtttattaggaattattctgctgtagcaggaaaaaaacttcctgaactgagccttcaaggcgctcagcaaagtaggctcaagcggccaggaattatcgatggcaaatactgtgatttggtatttgatttaataatacacattgatggttatgaagatgacttacaggcagtagatagtaagcctgacattttgaaagcgcattttccatctaactttgcaggtggtgttatgcatcagcctgagcttaactcaaatataaattggtgctgtttatatagtaatgaaaatcagttatttgaaaagttaaggcgactccctttatctggttgttgggttatgccaactgagcacaaaatacaggatttagatgagctactcttattattaaatagtgactctaaactaagcccatctatgatgggatatatgttactcaccgaaccgatggctagagttggatcacttgaaagactgcattgttatgctgaaccagcaataggagtggtgaaatacgaagcggccactagtgtaaggctaaaaggtattggtaactattttaatagcgctttttggatgctagatgcacaagaaaagtttatgctaatgaaaaaagtttaa

SEQ ID NO: 43 - protein, 350 aa, Pseudoalteromonas sp. S983
MELCNILKYDRSLYPGKAVFFYKTADSDFVPLEADINKIRGPKSGFTEAFTPQFSPKNISPQDLTHNNILTLEECYVPPNVEHIFCRFSLRVQANSLVPSGCSDPEVFSLLKELAETFKECGGYKELAVRYCRNILIGTWLWRNQNTGNTQIEIKTSKGSCYLIDNTRKLAWESKWASDDLKVLEELSNEIESALTDPNVFWSADITAKIEASFCQEIYPSQILNDKVKQGEASKQFVKAKCADGRYAVSFNSVKIGAALQSIDDWWDEDASKRLRVHEFGADKEIGVARRPPDSEQNFYSIFKNTEWYLSALKNCITNKNEKIDPAIYYLFSVLIKGGMFQKKAEAKKA

SEQ ID NO: 44 - DNA, 1053 bp, Pseudoalteromonas sp. S983
atggagctctgtaatatattaaaatatgatcgctcgctttaccctggtaaagctgtgtttttttataaaacggctgactctgattttgttccactagaggctgatattaataaaattcgaggccctaaatctggttttactgaagcattcaccccacagttttccccaaaaaacatctcacctcaggacttaacacataataatatattaactctcgaagagtgttatgtacctccaaatgtggagcatatattttgtcggttttctttgagagtacaggctaactcgttggtcccttcaggctgtagtgatccagaggttttttctttattaaaagagttggcagaaacatttaaagaatgcggtggttataaagaactagcagtaagatattgtcgaaatattttgataggtacatggctttggcgtaatcaaaacaccggcaacactcaaattgaaattaaaaccagcaaagggagttgttatttaatcgataacactcgtaagttagcttgggaaagcaaatgggcttctgatgatctaaaagtattggaagagcttagtaatgaaattgagagcgcattaactgatcccaatgtgttttggagtgctgatataaccgcgaaaatagaagcctcattttgccaagagatttacccaagccaaatccttaacgacaaggttaagcaaggagaggcctcaaaacagtttgtaaaagctaagtgtgcagatggccgttacgctgtaagttttaattcagtaaaaataggagcagcccttcagtcaatagatgattggtgggatgaggatgcaagtaaaagattacgagtgcatgagtttggtgctgataaagaaataggggttgcccgacgtcctcctgattctgaacagaatttttattctattttcaaaaatacggaatggtatttgtcagcccttaaaaattgcattactaataaaaatgaaaaaatagacccagctatttattacttattctctgtattgattaagggcggaatgttccagaaaaaagcagaggctaaaaaggcgtaa

SEQ ID NO: 45 - protein, 203 aa, Pseudoalteromonas sp. S983
MQRYYFTVHFLPKQANLALLTGRCISIMHGFILKHNIEGMGVTFPAWSDSSIGNEIAFVYTDKEILNTLKDQAYFVDMQDCGFFKVSQVLAVPDSCEEVRFIRNQAVAKIFTGESRRRLKRLQKRALARGEDFNPKKIEAPREIDIFHRVAMTSKSSQEDYILHIQKQDVDCQAEPYFSNYGLASNEKFKGTVPDLSPSIDRN

SEQ ID NO: 46 - DNA, 612 bp, Pseudoalteromonas sp. S983
atgcaaaggtattacttcacagtccactttttaccaaaacaagctaatctagcgctgcttactggccgttgtatttctattatgcatgggtttattttgaagcataatattgaaggaatgggggttacgtttcctgcatggtcggactcatcaattggtaatgaaattgcttttgtttacacggacaaggagattttaaatacccttaaagatcaggcatattttgtggacatgcaagattgtggcttttttaaagtaagccaagttttagctgtacctgacagctgcgaagaagtacgttttatacgtaatcaggcggtagcaaaaattttcacaggtgaaagtagaagaagattaaagcgcctgcaaaaaagagcgttagcaagaggtgaagattttaatcctaaaaagatcgaagctccccgagagattgatattttccatagagtggctatgactagtaagagttcacaagaggattatattctgcatattcaaaagcaagatgttgactgccaagctgagccatactttagtaattatgggcttgcctcaaatgaaaagtttaaaggcacggttccggatttatcaccctcaatagatagaaattaa

SEQ ID NO: 47 - DNA, 250 bp, Pseudoalteromonas sp. S983
tgtcgctgcaagcaaagcgtgacatacactggataggcatatcaataacttacaaaaaacctgcaaccattcactgacataaaatgcaaccatacagtgacatagtgaaataaaagttataacgctaaaaacaaaaaaaccagcccggatataagactggttttttcaattactactcactgccttttcggcagaattacattaacttaaacatcgaatcgattgtttttatcttcagctgcctatacgg

SEQ ID NO: 48 - DNA, 250 bp, Pseudoalteromonas sp. S983
tgtcgctgcaaccatagtttgacataatgcaaccataccttgacataattaaagtcatactctgacataaagccccttattaaaaatgatgctaaaaataaattccattataatcaattatttaagaattaattaaaccatagtgtgacatagtggctttttatttgtatagtatgtgtactcaaataataaaaatttacttatgtatatacgcaacttaagaaagccatctccaaataaaaatgtattt

SEQ ID NO: 49 - protein, 233 aa, Endozoicomonas ascidiicola
MTPLLSQYVGSRKLTPGRHRYKYPSRKMEAHVITESPNECNFCEFLEFDSRVKGYISQPKTIIYDLYQCGHDYTADFFVDLYLSKPAFYEIKPKDYEKSEEEEDKFYEVEKVFYDMGFNFYLVTGDYIEKGNRLINFKKLRRFVGSLPERKIREFIERLVFESNEGISFGDLIAKLRNQLDVEERDAFQNIYQCIANKIIGFDIDRYKLNQSVMVGVWNESFDRAWNGVPIQE

SEQ ID NO: 50 - DNA, 702 bp, Endozoicomonas ascidiicola
atgacaccacttcttagtcagtatgtaggatcaaggaagctgactccgggaaggcatcgctataaatatccaagcaggaaaatggaagcacacgtaatcactgaatctccaaatgaatgtaatttttgcgagtttcttgagtttgacagccgtgttaagggatatatttctcaaccaaaaactattatatatgacttatatcaatgtggtcatgattatactgccgatttttttgttgacttatatttatcgaaacctgccttctatgaaataaaaccgaaggattatgaaaaaagtgaggaggaagaagataaattctatgaggttgagaaggtgttttatgatatgggctttaatttttatttggtaacaggtgattatattgagaaaggaaatcgtttaattaattttaagaaacttcgtaggtttgtcggtagcttaccagaaagaaaaatacgagagtttattgagaggttggtctttgaaagtaatgaaggcatatctttcggcgatctgattgctaaattaagaaatcagttggatgttgaggaaagggacgcttttcaaaatatctatcaatgtatagcaaataaaatcattgggtttgatattgatagatataaattaaatcagtctgtaatggtaggtgtctggaatgagagcttcgatagagcctggaatggagtaccgattcaggaatag

SEQ ID NO: 51 - protein, 679 aa, Endozoicomonas ascidiicola
MRASIEPGMEYRFRNRVYSIVSVGDSEMIVMDRYDEEEIHISKDEFNKCWIKNEIKLVSGRMANSVKNKLKTPVSTLSEEQKKVAVRKEEYIKKFLDKKDALRKSETDLDYSKIIVEIAAELKDPYPPSLRTLMRWKSDYNAANGSIRSLINGFSNSGRKSNLNKCQKELIEKAIDNVYLQPEKGTVAQTHSELGVLVEIHNRENKDNESMIIKCPSRFQVQKAIENLDYLTKLEKREGKREAARDVRTSKHNYRPERILEIGETDHTLLDYYVIDDDLLMPLGRPWMTNIMELYSRIPLGSEITYENGSFITIANALKMSILPKSNFYEMYPDIKNTTNYSGILESLRTDNGADFISNDLDDAALEIGMILHHVQVTKSWQKGAIEGFFRKQNVMLLDKIKGKTFSNILERAKYDPKKQSLIRLSDFKNILYKWLYDVYPYNEVRVEHGKKIIPHKLWEKNIKDHPQDFIEKSNLDIIFGKTGSRKARDKGIEINNLKYDGIDLTKFRASHGNNETVKVKFDPSDLGFIHFFDKFEKRFIRLNAVDSEYANKLTLYQHGIIKKYVKEDMRRSEEDIKVLMDGKIQLRDMINDLLENKPSKLASKRGAQLRQGMTNSIADAGENQRDSIPRLEENQISSVSDVSVESTACDSIISDSKGTEESKKNTSYEKWTDDDIEW

SEQ ID NO: 52 - DNA, 2040 bp, Endozoicomonas ascidiicola
atgagagcttcgatagagcctggaatggagtaccgattcaggaatagggtttatagtattgtctccgtgggtgattccgagatgatcgtgatggatcggtatgatgaggaagaaattcatatatctaaagatgagttcaataagtgctggattaaaaatgaaataaaacttgtctcaggacgaatggctaattcagtaaaaaacaaattaaaaacgccagtatcaacgctcagtgaggagcaaaaaaaggtagcggtgcgaaaggaagagtatataaaaaaatttcttgacaagaaagatgcgctaagaaaatccgagactgatttagattattctaaaataattgttgaaattgcggctgaactgaaagatccatatcctccatcattaagaactctaatgagatggaaaagcgactacaatgcagcaaatggatctatacgatcattaattaatgggttttctaattctggcagaaagtcaaatttaaataaatgccaaaaagagctgattgaaaaggcaatagataatgtataccttcagccggaaaaaggaacagtggctcaaacgcatagtgaactcggagttcttgtggagatacataatcgggagaacaaagataatgaaagtatgataattaaatgtccaagccgatttcaagtacagaaagcaatagaaaatcttgattatttaaccaaactcgagaaaagagaaggaaagcgagaagcggctagagatgtgcgtacatctaagcataattatcgacccgaaaggatattggagataggtgaaactgatcatacattactcgactactatgtgatagatgatgatttactcatgcctcttgggcgaccgtggatgactaatataatggaattgtattctcgaatacctttaggctctgagataacctatgaaaatggtagctttattacaatcgctaatgccctaaaaatgtcaatactaccaaagagcaatttctacgaaatgtatcctgatattaaaaatacaaccaattattcaggcattcttgaaagtcttagaacggataatggagcagactttatatcgaatgacctagatgatgcagcactggaaatcggtatgattctacatcatgttcaggttacaaaatcttggcagaaaggagccatagaaggtttttttaggaagcagaacgtaatgctacttgataagattaaagggaaaaccttcagcaatatactagagcgtgcaaagtatgaccctaaaaagcaatcgttgataagactgtctgatttcaaaaatattttatacaagtggctatacgatgtttatccatataatgaagtaagagtagagcatggtaaaaaaataattccccataaactctgggaaaaaaacataaaggatcatcctcaagattttattgaaaaatctaacttggatattatttttggaaaaacaggcagtagaaaagcacgagacaaaggaatagagataaataacctgaagtatgatggtattgatttaactaaatttagagcatctcatggtaataatgaaaccgtcaaggttaagttcgatccatctgatctaggatttatacatttttttgataagtttgagaagcgctttattaggcttaatgctgtcgacagtgaatatgcaaataaacttactttatatcaacatggaattattaaaaagtatgtaaaagaggatatgagacgaagtgaggaggatataaaggttctgatggatgggaagattcaattaagagatatgatcaatgacttgttagaaaataagccgagtaaattagcttcaaaaagaggtgcgcagttgcgacagggaatgactaactctattgcggatgcaggtgaaaatcaaagagattcgataccaagattagaagaaaatcaaatcagttcggtgtcagatgttagtgttgaaagtactgcatgtgattcaattatctctgactccaagggtacagaagaaagtaaaaaaaacaccagttacgaaaagtggactgatgatgacatagagtggtag

SEQ ID NO: 53 - protein, 347 aa, Endozoicomonas ascidiicola
MMNIEKEIYYNCFIPTSRIVDVINDMIKCKKSFDTKMEPISMMIMAGSGYGKTLLINYFSSKYPPVTEKNDKGEQDKKEVLVVTLRSNSTKKDAATEMLKALGDPNPDKGSLLQQTDRILTLLCLCGVKVIIIDEFSHIVQSNSSRVLGKTADWIKDIIKPPKDNPKECPKIPLIAVGMYSSIKILQSNPQLDTLVTKKSYLFPYGISQKDELDFYKIFLSNVGNKIKNLGLEIDLEDPEIYLRLFAASNGIPRLLMKIISCACGIGCSRGDNKIVDVSCFENGFEDVFGKQKKNPFKATSLKDIPFTESTTYTTWVESKCSHAVLEGKNNGLLDVVFKTGKSKGFI

SEQ ID NO: 54 - DNA, 1044 bp, Endozoicomonas ascidiicola
atgatgaatatagaaaaagaaatttattataattgcttcatacccacttcaagaattgttgatgttattaatgatatgatcaaatgtaaaaaaagttttgatacaaagatggagccaatttcaatgatgattatggcgggaagtggatatggaaagacattattgattaactatttctcctcaaaatacccgccggttactgagaaaaatgataagggggaacaggataagaaagaagtcttagtcgtaacgttaagatcaaattcaactaaaaaagatgctgcaaccgaaatgttaaaggctcttggtgatccaaatccagataaaggaagtttattgcagcagacggaccgcattttgacattattgtgtctatgtggtgtaaaggttatcattattgatgagtttagccatattgttcagagcaacagtagtcgggttttaggtaaaacagcagattggattaaagatataattaagccacccaaagacaatccgaaggaatgcccaaaaataccgttaattgcagtcggaatgtacagtagcataaaaatccttcagtcaaatcctcagttggatacactcgttaccaaaaagtcatatctttttccttatggcatatctcaaaaagatgagctcgatttttacaagatttttttaagcaatgttggtaataaaataaagaatcttggcttggaaatagatctcgaagatccagagatctacttgagactttttgctgcatctaacggtattccgcgattactaatgaagataatctcatgtgcttgtggtatcggttgttcaaggggtgataataaaattgtggatgtctcctgttttgaaaatggctttgaggatgtctttggaaagcaaaagaaaaatccatttaaagccacgtcgctgaaagatattccctttactgagagtacaacttatacgacgtgggtggaatcaaaatgtagtcatgcggttcttgaaggaaaaaacaatggtttattagatgtggtttttaaaactggaaaatcaaaaggttttatttag

SEQ ID NO: 55 - protein, 629 aa, Endozoicomonas ascidiicola
MLLLSRPTPNKLESLRGYILRLSQANSYHTTQYVLELADLWTGRNYDTASKYVFGDSNLSKLAKITNTSKGELEALRYGLDDQKQSSIHGHLISNEHLRLDYPRVCPECLESNNIALAVWDIPALTVCPVHHMSLFDYCPECNTRLRWNRPAVHQCHKCNCDFRSYTSDKLSEKQYRLSRLIHQLCMIDKINHRMIPNVLKNHSLAEVLSLVSSIAFFDYHLLGDQSKDGKFLSLKTAPNYRLHEHYTNAMKHLDNWPHNFYQFMAESRQNRRSQGMKEGISKEVGGIFYFLRANNEKAIYRPLWEAYCNFREVAARKTLDELRLARIHAKNIPVSTAAKELKIRPEQLRKFCERLNIPLETAYKDVKLISREQVADLKDFISKLLTIRQSADIMGISVYQLRAMVRKDVITPLRGPTIDQSRDWYFEPESIEAFHQQIAKYCLYKGAKRTHDMDLKQALEQLSYYQMGLAEIVQAISAGKLRPASESKAITLNALQFSAEEIKALRPELKSNNDYWQPPEIEKYLGCKKDLVYGLLKSGHLPMEKVSLPGRTRPVVACKKSEVKAFNENFYLLRTLSRKTGVVSEKLRKLLEAKKIQPVSGPTVDGGYCHFYKKNKNIDKLLKELGAK

SEQ ID NO: 56 - DNA, 1890 bp, Endozoicomonas ascidiicola
atgctgctactctcaagaccaacacccaacaaacttgaaagcctgagaggctatatcctccgtttatcgcaagcaaatagctaccatacaacccagtatgttttagagctggcagacctttggactggtagaaactatgatactgccagcaagtacgtttttggtgatagcaacttgagtaagttggcaaagatcaccaacacttccaagggagagttggaggctttacggtacgggcttgatgaccaaaaacagtcgagtattcatggccatctaattagtaatgagcatttgaggctggattacccacgagtctgtcctgagtgtcttgagtccaacaatatagctctcgctgtatgggatattccggcactgactgtttgccctgtgcatcacatgagtctttttgattattgtcctgaatgcaatacccgccttcgttggaatcgaccggctgtacatcagtgtcataagtgcaactgcgactttcgctcttatacgagtgataaattgtctgaaaaacaataccgcttatccagacttatccatcagctctgtatgatagataaaataaaccaccgaatgattccaaacgtattgaaaaatcatagcctggcggaggttctcagcctggtcagctctattgcattttttgattatcatctattgggtgatcagagcaaagatgggaaatttctttctttgaaaaccgctccaaactatcggctacatgaacattacactaatgctatgaagcatctggataactggccccataacttttatcagtttatggctgagagccggcagaatcgtaggagtcagggaatgaaagaaggtataagcaaagaagtgggggggatcttttattttcttcgcgccaataatgaaaaggccatatataggcctttatgggaggcctattgcaacttcagagaggtagctgcgcgaaaaaccctcgatgagctacgccttgctcgtattcatgcaaaaaatattcccgtcagcaccgcagctaaagagcttaagatacgtcctgagcagcttcgtaagttctgtgaaaggcttaatataccgttagaaaccgcctataaggatgtcaaactgatttcccgagagcaagtggctgatctaaaggattttatcagtaagttactgaccatcagacagtccgcagacattatgggtatctcggtgtatcaactccgagcgatggttcgtaaagatgttattactccattgcgtggtccaaccattgatcaatcaagagactggtactttgagccagaatctatagaagcctttcatcagcagatagccaagtattgtttatacaaaggtgcaaagcgtactcatgatatggatctaaaacaggctttagaacaactttcatactaccaaatggggttggctgagatcgttcaggccatttccgcaggtaaattacgacctgccagcgagagtaaagcgatcacgttaaatgcactccagttttcagctgaggaaatcaaagcacttcggccagagctgaaatcaaataatgactattggcagccaccggagatagaaaaataccttggctgtaaaaaagatcttgtttacgggttgttgaaaagtggccatttacctatggaaaaggtcagtctccccggtagaacccgccctgttgtcgcgtgtaaaaaatctgaggtgaaagcatttaatgaaaacttttacttgcttcgtactctcagccgaaaaacgggagttgtcagtgaaaaattaagaaaactgctggaagccaaaaaaatccaacccgtttctggtcctactgttgatggcggttactgtcacttttacaaaaagaataaaaacattgataaactcctgaaggagttgggtgctaagtga

SEQ ID NO: 57 - protein, 396 aa, Endozoicomonas ascidiicola
MLLSRPYIQDDESIESYIIRLSGANGYTVRQFVNIYFTGFQSYKDFDKYTPPLKLVNLNHGCFKNKDRISFFELISSSTRQDKARLFNNLVESVPSENLELSKYIYKGVEVPACLFRSESVPICPLCLVDSPYIRQYWHIALVQCCSKHKIDLLKSCPRCQTTISYLNHELILCCPCGYSFIQEPSSYLNKNHDEVLLSLVDLIYSSMTENSIRAELSSLPSDNIYTIFGMAVFYFQYLGKLTHLSKKFYAFLDFIRRWPRSYIALLSENADKGLRYLIKPSNESEFKSIFGSLLNNIKRLPNNLDKDDLIKKETYAFFRQRLLLDKKNENKNSVSNLLLTKDEVALLLGVSTDRVAKLTSKGKLCAKRKTLKAYVGSYPLGEVFDLLSETDSAIF

SEQ ID NO: 58 - DNA, 1191 bp, Endozoicomonas ascidiicola
atgctattatcaagaccttatatacaggatgatgaatctattgaaagctatattatccgtctttcaggagccaacggttatacggttagacagtttgtaaatatttattttacaggctttcaatcttataaggattttgataaatatacaccacctcttaaacttgttaatctcaatcatggttgttttaagaataaagatcgtatatctttttttgagttaatcagttcttctacgaggcaggataaagcaagattattcaacaatttagtagaatctgtaccttctgaaaatcttgaattgtcaaaatatatttataaaggggtcgaggttcctgcttgcctattcaggagtgagtcagtacctatatgcccattatgtttagttgattctccttatattagacagtattggcatatagctttagttcaatgttgttcaaagcataaaatagatttattgaagtcttgccctcgttgtcagactactatttcatatttgaatcatgagttgatattgtgctgtccttgtggttatagttttatccaggagccatcttcctatcttaacaaaaatcatgatgaggtacttctatcgctggtagacctaatttatagcagcatgactgagaatagtattcgagcagaattaagttcattaccttcagataacatttatacaatttttggaatggccgttttttattttcaatatttgggtaaacttacacacttgtcaaaaaaattttatgcatttttagatttcattagaaggtggcctcgtagctatatagcgttgctatctgagaatgctgacaagggtctgcgttatcttattaaaccatctaatgaatcagagtttaagtccatttttggtagcttattaaataatattaagcgtctacctaataatttagataaggatgatttgattaagaaggagacatacgctttcttccgtcagaggttgttgttggataaaaaaaatgaaaataaaaactctgtctcaaatctgctgttgactaaagatgaagtggcattattgttaggtgtatcaacggatcgagtagccaagctgacttctaaaggaaagttgtgtgcaaaacgaaagaccttaaaggcttatgtgggcagttatccattgggcgaggtatttgatcttttgagcgaaacagattctgctatattttag

SEQ ID NO: 59 - protein, 736 aa, Endozoicomonas ascidiicola
MAFIELDIGYNIESRSTLEFSTSMLSVPSDITGKVNSFFAQIINQSNKSKSSLSGTPLQTARSLLKSKLFIIDACQSLKGFLTHNPKIYDAKVRGRVFSLSVNSGTDSSYIYGDSVSYHHQYDWAGNAGYISKRYFLCTEFIYKGDNTTLYHEFLKESSELVEMLTGLGLTSKHRELIKTSCLAHQDSAFPNSVPPYQVQVLIPYTDVNKNTEYISVSPISASKVQAAIHTFCHSENAHTVGRSFHYPTRPENIGALAISTGGSIGVLAPDIILESEIVPTSSDILKELRVNVNKDLFDTSNLDFSYFLKLRKKADFAIGRYIPTPKSSQKAAFLDIIKNNVEKMFSKLDKLRLAVQLGVLHEDKVDGLNLVQRSYVIEQKLSEAIMNQVWTQANNSIQKFISGTHYKQIAYHPTLTRYISESVRRHLQPVFRGNIESSKPEIVTDGHEGEKEDTNEPIKTAANAIVFIVIPRLTVIDAHADSSAYTTGLPGITALVGYVDKLCRNIQIQTKVEIDNIEVAWLLRDFQRIEGMKKHEPARWDSKKKTTLSDVVSRKFCNLSFDLILKCSADYEQLNCLKEELPDCLPAKFASGMVSTAEEISTKNYMSESFLIFQSEQDLLNELQSEDSLRWAVLDYSEKFVRKSDSILEDLADAFLEYKEQNPRWNQLTVSNVGFKLLEEPVTRPNSRLTHHAYAEPVIGVQELWLIKNLSPEVFGTLPIFWAYRSAGKRILCQA

SEQ ID NO: 60 - DNA, 2211 bp, Endozoicomonas ascidiicola
atggcgttcatagaattagatattggatacaatatcgagtcgaggtcaactttggaattttctacctctatgctctctgttccttcagatattacaggaaaggtaaacagtttctttgcccaaattataaatcagtccaataaatctaagtcaagtctttcaggaacgccattacagacagctagatcattacttaaaagcaagctgttcattattgatgcttgtcaatccttaaaaggttttctgactcataatcctaaaatttatgatgctaaagtccgaggaagggttttttcattgtcagtaaactctggaactgattcctcttatatttatggtgactcagttagctaccatcatcaatacgattgggcaggtaacgccggatacatatcaaagcgatatttcctttgcactgagtttatatataaaggagataatacaacgctgtatcatgagttcctcaaagagtcatcggagcttgtggagatgcttacagggctagggctaacaagtaagcatcgagaacttatcaaaacctcttgcctagctcatcaagatagtgcttttccaaactctgtgcccccctatcaggttcaagtgcttattccatatactgatgtaaacaagaatacagaatatatttcggtttcgccaatatctgcctcaaaggttcaagcggctatacacaccttttgtcatagcgaaaatgctcacacagtgggtcggtcttttcattatccgaccaggccggaaaatattggtgctttagcgatctctacaggtggaagtattggagtgctggcaccggatataatcttggaatcagagattgtacccacttcttcagacatactgaaagagcttagagttaacgtcaacaaggatctttttgatacttctaatctggactttagttattttcttaaactacgaaagaaagctgactttgcgataggtcggtacatccccactccaaagtcgtcccaaaaagccgcgtttctcgacatcatcaagaacaatgtggagaaaatgttctctaaactagataaactccggcttgctgttcagcttggagttctgcatgaagataaggtcgatgggctaaacttagttcaaagaagttatgtaatcgagcagaaactttctgaggcgataatgaatcaggtatggactcaggctaataattctattcagaaatttatctcagggactcactacaaacaaattgcttatcaccctacgcttacccgttatattagcgaaagtgttcggcgtcatctacaacctgtattcagaggtaatattgagtcctcaaagccggaaattgtcactgatggtcatgaaggggagaaagaagatactaatgagccaattaaaacagctgccaatgccattgttttcatagtcatccccaggctgacggttatagatgctcatgcagatagttcggcatacacaacaggcctccccggaatcactgctcttgttggttatgttgataagctttgcagaaatattcaaattcaaactaaggtcgaaattgataacatcgaagtagcctggcttcttcgtgattttcagcgtattgagggtatgaaaaaacacgagccagctcgttgggacagtaaaaagaaaacaactttgagtgatgttgtcagtcgtaaattctgtaacctatcgtttgacttgattttaaaatgttctgcggactatgagcaactcaactgcttaaaggaggagttgccagattgcctgcccgctaaatttgcttcaggcatggtcagtactgcggaagagatttccacaaaaaattatatgtcagaatctttcttgatttttcagtcagagcaagatttgcttaatgaactccaatccgaagattctcttcgctgggctgtgcttgattactcagaaaagtttgtacgtaagtcagattctatactagaggatctggcagatgctttccttgagtacaaggaacagaaccctcgctggaaccaactcacggtttcaaatgttggtttcaaattattggaggagcctgtcacgcgaccgaatagcaggcttacacatcatgcgtatgcagaacctgtgatcggtgtacaagagttgtggttgataaaaaatctgtctccagaagtgtttggcacattaccgattttttgggcatatcgatcggcaggaaaaagaatcctgtgccaagcataa

SEQ ID NO: 61 - protein, 369 aa, Endozoicomonas ascidiicola
MILPTILTYEKSLAPSVALMFAKTYDNKKVPIEVYDAKGRGAQTTFTACHGTKDTDLGEWLPVRQDICHLPHDASELIIEFPLKYSPNSMKPGSCNVADWTTLLKEMALLYGEKGGYLYQAYCQMDALFQAVPFWRNKDAESMTLRVMNISDSILPPYVFTNLPCSIDELIGSDKQQLDSLIKNIESALTGKRNFLRLRVIAELKKDILEEVHPSQQFIEKLPEAKKEYLHRQGRYQKSRQYVSYNLGNFRQAMLRPTKIGAGLRPDRWNDVAKEVPVSVYGLDPESHAAIRGRGTKNDFYTLISNIKKHIETLRAFDGDMFNDESILTLGNIHFIMANLIKGGVYNRESSKTKNKGEPDECPIDLSNP

SEQ ID NO: 62 - DNA, 1110 bp, Endozoicomonas ascidiicola
atgatacttccaacgatccttacctatgaaaagtctctggcgccttctgttgccctgatgtttgcaaaaacgtacgacaataaaaaggttccgattgaggtttatgatgcaaaagggcggggagcgcaaacaacctttactgcctgtcatggaactaaagatacagacttaggtgagtggttgcctgtaaggcaagatatttgtcatttaccacatgatgccagtgagttaataattgagttcccccttaaatactctcctaattccatgaagccagggtcttgtaatgttgccgattggactaccctgctaaaggagatggctctcctctatggggaaaaagggggctatttatatcaggcatactgtcagatggatgctctttttcaagctgttcccttttggaggaataaagatgctgaaagcatgacattacgggttatgaatatcagtgatagcatcctgccaccttatgttttcacaaatcttccatgttctattgatgaactgattggtagtgacaagcagcagcttgattcacttatcaaaaatatcgaaagcgcattgacgggtaaacgaaattttttacgccttcgagttatcgcagaattaaagaaagatattcttgaagaagtgcacccaagccagcaatttattgaaaagttacctgaagctaaaaaagaatacctccatcgacagggaaggtatcagaagtccaggcaatatgtctcttacaacctgggtaattttcgtcaggccatgttacgcccaacaaaaataggagccggtttacggcctgatcgatggaatgatgtcgctaaagaggttccagtgagtgtttatgggctcgacccggaaagccatgcagcgataagagggcgtggcactaagaacgatttctatactctgatcagtaacatcaaaaagcatattgagacactcagagcttttgacggtgatatgtttaatgatgagtcgatactaactcttggcaatattcacttcattatggccaacttgattaaaggcggtgtgtataaccgagaaagctccaagacaaaaaataaaggtgagccagatgaatgcccaatcgatttaagtaatccgtga

SEQ ID NO: 63 - protein, 208 aa, Endozoicomonas ascidiicola
MNYLSFKIIPDDADPRFLLGYILQEAHPIIARYGNNKIGTLFPEWNVDEPGRSIAFCGALDVLNRIMKHEYFRVMIDAGVLKYNLLDIDPINHQKVIFLKNQKITSNTPKRQQGKIKRIIKRQIERGEIQSAREYRPRTDQQQTDMPDVFYHLFFLDSKSTEQIMPLCIQMIPVAESEGIVGTQTFDHYGFSTLEQHRAVVPLISPIF

SEQ ID NO: 64 - DNA, 627 bp, Endozoicomonas ascidiicola
atgaattatctgtcatttaaaattattcctgacgatgcagatccaaggtttttattaggctatatacttcaagaggctcatcctataattgctcgttatggcaataataaaattggtacgttgtttcctgaatggaatgtcgatgaacctggtcgttcaattgctttttgtggagcattggatgttctaaatagaatcatgaaacacgaatatttcagggttatgattgatgctggggtgttaaaatacaatttactagacattgatcctatcaatcatcagaaagtgatttttttaaagaatcagaaaatcaccagcaatacgcctaaacgccagcaaggaaagatcaaacggataataaaaaggcagatagagagaggtgaaattcaaagtgccagagagtatcgacccagaacagatcaacaacagactgacatgccagacgttttctaccatcttttttttcttgatagtaagagcactgagcagattatgccactctgcattcaaatgataccagtcgctgagagtgaaggaatagtcggtactcagacctttgatcactatggattcagcacacttgagcaacatcgtgcggtagtgcctctgatttcaccaatattttaa

SEQ ID NO: 65 - DNA, 250 bp, Endozoicomonas ascidiicola
tggtggtttaataaaagtttggcatagaatgtcacaaacaataacctcataaatcaataagttatgaaaattcggctgaaaaatatttaaaaaatgattgtcacattttttaagtaatgattggcattttcttcaaaacctacaaggcaatactaatgtactaatattttgagtcgtaaatttacacactcagtcaagtacggaacagaattcagttcttttactggatggagcattaaaacaagatcgt

SEQ ID NO: 66 - DNA, 250 bp, Endozoicomonas ascidiicola
tggttttttaagtaaagattgtcatttttaaattatagtatgacataaaattcaaggaaagattggcacaatagatgtttagcttctataaatagatacagatgttttgaatctgtttataggagctcaaattaatgacaccacttcttagtcagtatgtaggatcaaggaagctgactccgggaaggcatcgctataaatatccaagcaggaaaatggaagcacatgtaatcactgaatctccaaatga

SEQ ID NO: 67 - DNA, 3229 bp, Artificial sequence
  Synthetic
ctgtcagaccaagtttactcatatatactttagattgatttaaaacttcatttttaatttaaaaggatctaggtgaagatcctttttgataatctcatgaccaaaatcccttaacgtgagttttcgttccactgagcgtcagaccccgtagaaaagatcaaaggatcttcttgagatcctttttttctgcgcgtaatctgctgcttgcaaacaaaaaaaccaccgctaccagcggtggtttgtttgccggatcaagagctaccaactctttttccgaaggtaactggcttcagcagagcgcagataccaaatactgttcttctagtgtagccgtagttaggccaccacttcaagaactctgtagcaccgcctacatacctcgctctgctaatcctgttaccagtggctgctgccagtggcgataagtcgtgtcttaccgggttggactcaagacgatagttaccggataaggcgcagcggtcgggctgaacggggggttcgtgcacacagcccagcttggagcgaacgacctacaccgaactgagatacctacagcgtgagctatgagaaagcgccacgcttcccgaagggagaaaggcggacaggtatccggtaagcggcagggtcggaacaggagagcgcacgagggagcttccagggggaaacgcctggtatctttatagtcctgtcgggtttcgccacctctgacttgagcgtcgatttttgtgatgctcgtcaggggggcggagcctatggaaaaacgccagcaacgcggcctttttacggttcctggccttttgctggccttttgctcacatgttctttcctgcgttatcccctgattctgtggataaccgtattaccgcctttgagtgagctgataccgctcgccgcagccgaacgaccgagcgcagcgagtcagtgagcgaggaagcggaagagcctcatctgtcattcctttgtgagtttgtaaatacaaccatacattgcaacaatacaactatatgttgaatcaaaacacctataccttgcattgtataaaaagtgtaccatactttcgaaagtttactacaagtgtggatactttgtatgaaaaaacgaatcattaaaaactccaaagttaagaacatttctcgttttgttagcttgaagacagattcagttcaaacaactgaatctgatcttgagtttgatgcatgttttcattttgaattcgccaagaggcagtccctcttagaggatccatggagaaaaaaatcactggatataccaccgttgatatatcccaatggcatcgtaaagaacattttgaggcatttcagtcagttgctcaatgtacctataaccagaccgttcagctggatattacggcctttttaaagaccgtaaagaaaaataagcacaagttttatccggcctttattcacattcttgcccgcctgatgaatgctcatccggagttccgtatggcaatgaaagacggtgagctggtgatatgggatagtgttcacccttgttacaccgttttccatgagcaaactgaaacgttttcatcgctctggagtgaataccacgacgatttccggcagtttctacacatatattcgcaagatgtggcgtgttacggtgaaaacctggcctatttccctaaagggtttattgagaatatgtttttcgtctcagccaatccctgggtgagtttcaccagttttgatttaaacgtggccaatatggacaacttcttcgcccccgttttcactatgggcaaatattatacgcaaggcgacaaggtgctgatgccgctggcgattcaggttcatcatgccgtttgtgatggcttccatgtcggcagaatgcttaatgaattacaacagtactgcgatgagtggcagggcggggcgtaatttttttaaggcagttattggtgccctggtaccctgcccaagtcttatgaatgcttctatgtgatcaccaagcgattcggtcgtaccttaattaccaagcgactttgtcgacttacacatgactaggtgaagtgatggaactatttttgtaagaaagtttcttactgcgctttgatacctcaaatatatcgtcacaaaaaaattatcttatggttgtattaagcaatatcaacatatggttgtatttttctaatactttgatattaaagtaattataaatgtcactttatggttgtatcaacagagttattgttctgacaatgtagcagacgtcaggtggcacttttcggggaaatgtgcgcggaacccctatttgtttatttttctaaatacattcaaatatgtatccgctcatgagacaataaccctgataaatgcttcaataatattgaaaaaggaagagtatgagtattcaacatttccgtgtcgcccttattcccttttttgcggcattttgccttcctgtttttgctcacccagaaacgctggtgaaagtaaaagatgctgaagatcagttgggtgcacgagtgggttacatcgaactggatctcaacagcggtaagatccttgagagttttcgccccgaagaacgttttccaatgatgagcacttttaaagttctgctatgtggcgcggtattatcccgtattgacgccgggcaagagcaactcggtcgccgcatacactattctcagaatgacttggttgagtactcaccagtcacagaaaagcatcttacggatggcatgacagtaagagaattatgcagtgctgccataaccatgagtgataacactgcggccaacttacttctgacaacgatcggaggaccgaaggagctaaccgcttttttgcacaacatgggggatcatgtaactcgccttgatcgttgggaaccggagctgaatgaagccataccaaacgacgagcgtgacaccacgatgcctgtagcaatggcaacaacgttgcgcaaactattaactggcgaactacttactctagcttcccggcaacaattaatagactggatggaggcggataaagttgcaggaccacttctgcgctcggcccttccggctggctggtttattgctgataaatctggagccggtgagcgtgggtctcgcggtatcattgcagcactggggccagatggtaagccctcccgtatcgtagttatctacacgacggggagtcaggcaactatggatgaacgaaatagacagatcgctgagataggtgcctcactgattaagcattggtaa

SEQ ID NO: 68 - DNA, 3229 bp, Artificial sequence
  Synthetic
ctgtcagaccaagtttactcatatatactttagattgatttaaaacttcatttttaatttaaaaggatctaggtgaagatcctttttgataatctcatgaccaaaatcccttaacgtgagttttcgttccactgagcgtcagaccccgtagaaaagatcaaaggatcttcttgagatcctttttttctgcgcgtaatctgctgcttgcaaacaaaaaaaccaccgctaccagcggtggtttgtttgccggatcaagagctaccaactctttttccgaaggtaactggcttcagcagagcgcagataccaaatactgttcttctagtgtagccgtagttaggccaccacttcaagaactctgtagcaccgcctacatacctcgctctgctaatcctgttaccagtggctgctgccagtggcgataagtcgtgtcttaccgggttggactcaagacgatagttaccggataaggcgcagcggtcgggctgaacggggggttcgtgcacacagcccagcttggagcgaacgacctacaccgaactgagatacctacagcgtgagctatgagaaagcgccacgcttcccgaagggagaaaggcggacaggtatccggtaagcggcagggtcggaacaggagagcgcacgagggagcttccagggggaaacgcctggtatctttatagtcctgtcgggtttcgccacctctgacttgagcgtcgatttttgtgatgctcgtcaggggggcggagcctatggaaaaacgccagcaacgcggcctttttacggttcctggccttttgctggccttttgctcacatgttctttcctgcgttatcccctgattctgtggataaccgtattaccgcctttgagtgagctgataccgctcgccgcagccgaacgaccgagcgcagcgagtcagtgagcgaggaagcggaagagcgatgtggctggggcttccacctatttgatgcttgcaaaattactctgcataaattgcaaagaagtctacaaatttgcaaaataagcctgcataaactacctttagttgtaagtttacaacatagaggtgaatatcatgtacgttcgtacactaaaacaatctcaagtaaaaaacattagcaaatttatgagcctgaagaatgattcgatcattcgtacagaatctatgcttgaatttgatatgtgctttcatcttgaatattctcctgatgttgtcctcccaacatcgttaaaagggatccatggagaaaaaaatcactggatataccaccgttgatatatcccaatggcatcgtaaagaacattttgaggcatttcagtcagttgctcaatgtacctataaccagaccgttcagctggatattacggcctttttaaagaccgtaaagaaaaataagcacaagttttatccggcctttattcacattcttgcccgcctgatgaatgctcatccggagttccgtatggcaatgaaagacggtgagctggtgatatgggatagtgttcacccttgttacaccgttttccatgagcaaactgaaacgttttcatcgctctggagtgaataccacgacgatttccggcagtttctacacatatattcgcaagatgtggcgtgttacggtgaaaacctggcctatttccctaaagggtttattgagaatatgtttttcgtctcagccaatccctgggtgagtttcaccagttttgatttaaacgtggccaatatggacaacttcttcgcccccgttttcactatgggcaaatattatacgcaaggcgacaaggtgctgatgccgctggcgattcaggttcatcatgccgtttgtgatggcttccatgtcggcagaatgcttaatgaattacaacagtactgcgatgagtggcagggcggggcgtaatttttttaaggcagttattggtgccctggtacctaccaaaacccttcgacatcctaaatttagtagttatcaaatatacataactgccgtattagaaccagaagtagcacgttcatgtctaaatattaattaaatttgttaacaataagtgaaatttaattacatactaaaattacagtcatattttaaggtaaaacattttgcagactatcactgcaaagctatgtaatcttatgctgcaaactcaaaattaagctcttgatttttagatgagggctatgcagacttatgttgcaagcatcactatttaaaacgccgcttttattaggacgtcaggtggcacttttcggggaaatgtgcgcggaacccctatttgtttatttttctaaatacattcaaatatgtatccgctcatgagacaataaccctgataaatgcttcaataatattgaaaaaggaagagtatgagtattcaacatttccgtgtcgcccttattcccttttttgcggcattttgccttcctgtttttgctcacccagaaacgctggtgaaagtaaaagatgctgaagatcagttgggtgcacgagtgggttacatcgaactggatctcaacagcggtaagatccttgagagttttcgccccgaagaacgttttccaatgatgagcacttttaaagttctgctatgtggcgcggtattatcccgtattgacgccgggcaagagcaactcggtcgccgcatacactattctcagaatgacttggttgagtactcaccagtcacagaaaagcatcttacggatggcatgacagtaagagaattatgcagtgctgccataaccatgagtgataacactgcggccaacttacttctgacaacgatcggaggaccgaaggagctaaccgcttttttgcacaacatgggggatcatgtaactcgccttgatcgttgggaaccggagctgaatgaagccataccaaacgacgagcgtgacaccacgatgcctgtagcaatggcaacaacgttgcgcaaactattaactggcgaactacttactctagcttcccggcaacaattaatagactggatggaggcggataaagttgcaggaccacttctgcgctcggcccttccggctggctggtttattgctgataaatctggagccggtgagcgtgggtctcgcggtatcattgcagcactggggccagatggtaagccctcccgtatcgtagttatctacacgacggggagtcaggcaactatggatgaacgaaatagacagatcgctgagataggtgcctcactgattaagcattggtaa

SEQ ID NO: 69 - DNA, 3229 bp, Artificial sequence
  Synthetic
ctgtcagaccaagtttactcatatatactttagattgatttaaaacttcatttttaatttaaaaggatctaggtgaagatcctttttgataatctcatgaccaaaatcccttaacgtgagttttcgttccactgagcgtcagaccccgtagaaaagatcaaaggatcttcttgagatcctttttttctgcgcgtaatctgctgcttgcaaacaaaaaaaccaccgctaccagcggtggtttgtttgccggatcaagagctaccaactctttttccgaaggtaactggcttcagcagagcgcagataccaaatactgttcttctagtgtagccgtagttaggccaccacttcaagaactctgtagcaccgcctacatacctcgctctgctaatcctgttaccagtggctgctgccagtggcgataagtcgtgtcttaccgggttggactcaagacgatagttaccggataaggcgcagcggtcgggctgaacggggggttcgtgcacacagcccagcttggagcgaacgacctacaccgaactgagatacctacagcgtgagctatgagaaagcgccacgcttcccgaagggagaaaggcggacaggtatccggtaagcggcagggtcggaacaggagagcgcacgagggagcttccagggggaaacgcctggtatctttatagtcctgtcgggtttcgccacctctgacttgagcgtcgatttttgtgatgctcgtcaggggggcggagcctatggaaaaacgccagcaacgcggcctttttacggttcctggccttttgctggccttttgctcacatgttctttcctgcgttatcccctgattctgtggataaccgtattaccgcctttgagtgagctgataccgctcgccgcagccgaacgaccgagcgcagcgagtcagtgagcgaggaagcggaagagcgtgttgatcggctttaaggatctagtgtcgctgcaaccatagtttgacataatgcaaccataccttgacataattaaagtcatactctgacataaagccccttattaaaaatgatgctaaaaataaattccattataatcaattatttaagaattaattaaaccatagtgtgacatagtggctttttatttgtatagtatgtgtactcaaataataaaaatttacttatgtatatacgcaacttaagaaagccatctccaaataaaaatgtatttaagaggcagtccctcttagaggatccatggagaaaaaaatcactggatataccaccgttgatatatcccaatggcatcgtaaagaacattttgaggcatttcagtcagttgctcaatgtacctataaccagaccgttcagctggatattacggcctttttaaagaccgtaaagaaaaataagcacaagttttatccggcctttattcacattcttgcccgcctgatgaatgctcatccggagttccgtatggcaatgaaagacggtgagctggtgatatgggatagtgttcacccttgttacaccgttttccatgagcaaactgaaacgttttcatcgctctggagtgaataccacgacgatttccggcagtttctacacatatattcgcaagatgtggcgtgttacggtgaaaacctggcctatttccctaaagggtttattgagaatatgtttttcgtctcagccaatccctgggtgagtttcaccagttttgatttaaacgtggccaatatggacaacttcttcgcccccgttttcactatgggcaaatattatacgcaaggcgacaaggtgctgatgccgctggcgattcaggttcatcatgccgtttgtgatggcttccatgtcggcagaatgcttaatgaattacaacagtactgcgatgagtggcagggcggggcgtaatttttttaaggcagttattggtgccctggtaccctgcccaagtcttatgaatgccgtataggcagctgaagataaaaacaatcgattcgatgtttaagttaatgtaattctgccgaaaaggcagtgagtagtaattgaaaaaaccagtcttatatccgggctggtttttttgtttttagcgttataacttttatttcactatgtcactgtatggttgcattttatgtcagtgaatggttgcaggttttttgtaagttattgatatgcctatccagtgtatgtcacgctttgcttgcagcgacatctaggatcttagcgcgcttttatggacgtcaggtggcacttttcggggaaatgtgcgcggaacccctatttgtttatttttctaaatacattcaaatatgtatccgctcatgagacaataaccctgataaatgcttcaataatattgaaaaaggaagagtatgagtattcaacatttccgtgtcgcccttattcccttttttgcggcattttgccttcctgtttttgctcacccagaaacgctggtgaaagtaaaagatgctgaagatcagttgggtgcacgagtgggttacatcgaactggatctcaacagcggtaagatccttgagagttttcgccccgaagaacgttttccaatgatgagcacttttaaagttctgctatgtggcgcggtattatcccgtattgacgccgggcaagagcaactcggtcgccgcatacactattctcagaatgacttggttgagtactcaccagtcacagaaaagcatcttacggatggcatgacagtaagagaattatgcagtgctgccataaccatgagtgataacactgcggccaacttacttctgacaacgatcggaggaccgaaggagctaaccgcttttttgcacaacatgggggatcatgtaactcgccttgatcgttgggaaccggagctgaatgaagccataccaaacgacgagcgtgacaccacgatgcctgtagcaatggcaacaacgttgcgcaaactattaactggcgaactacttactctagcttcccggcaacaattaatagactggatggaggcggataaagttgcaggaccacttctgcgctcggcccttccggctggctggtttattgctgataaatctggagccggtgagcgtgggtctcgcggtatcattgcagcactggggccagatggtaagccctcccgtatcgtagttatctacacgacggggagtcaggcaactatggatgaacgaaatagacagatcgctgagataggtgcctcactgattaagcattggtaa

SEQ ID NO: 70 - DNA, 3229 bp, Artificial sequence
  Synthetic
ctgtcagaccaagtttactcatatatactttagattgatttaaaacttcatttttaatttaaaaggatctaggtgaagatcctttttgataatctcatgaccaaaatcccttaacgtgagttttcgttccactgagcgtcagaccccgtagaaaagatcaaaggatcttcttgagatcctttttttctgcgcgtaatctgctgcttgcaaacaaaaaaaccaccgctaccagcggtggtttgtttgccggatcaagagctaccaactctttttccgaaggtaactggcttcagcagagcgcagataccaaatactgttcttctagtgtagccgtagttaggccaccacttcaagaactctgtagcaccgcctacatacctcgctctgctaatcctgttaccagtggctgctgccagtggcgataagtcgtgtcttaccgggttggactcaagacgatagttaccggataaggcgcagcggtcgggctgaacggggggttcgtgcacacagcccagcttggagcgaacgacctacaccgaactgagatacctacagcgtgagctatgagaaagcgccacgcttcccgaagggagaaaggcggacaggtatccggtaagcggcagggtcggaacaggagagcgcacgagggagcttccagggggaaacgcctggtatctttatagtcctgtcgggtttcgccacctctgacttgagcgtcgatttttgtgatgctcgtcaggggggcggagcctatggaaaaacgccagcaacgcggcctttttacggttcctggccttttgctggccttttgctcacatgttctttcctgcgttatcccctgattctgtggataaccgtattaccgcctttgagtgagctgataccgctcgccgcagccgaacgaccgagcgcagcgagtcagtgagcgaggaagcggaagagccaatctggttgagattatttaacgttggttttttaagtaaagattgtcatttttaaattatagtatgacataaaattcaaggaaagattggcacaatagatgtttagcttctataaatagatacagatgttttgaatctgtttataggagctcaaattaatgacaccacttcttagtcagtatgtaggatcaaggaagctgactccgggaaggcatcgctataaatatccaagcaggaaaatggaagcacatgtaatcactgaatctccaaatgacatgcgagataaggtactgaggatccatggagaaaaaaatcactggatataccaccgttgatatatcccaatggcatcgtaaagaacattttgaggcatttcagtcagttgctcaatgtacctataaccagaccgttcagctggatattacggcctttttaaagaccgtaaagaaaaataagcacaagttttatccggcctttattcacattcttgcccgcctgatgaatgctcatccggagttccgtatggcaatgaaagacggtgagctggtgatatgggatagtgttcacccttgttacaccgttttccatgagcaaactgaaacgttttcatcgctctggagtgaataccacgacgatttccggcagtttctacacatatattcgcaagatgtggcgtgttacggtgaaaacctggcctatttccctaaagggtttattgagaatatgtttttcgtctcagccaatccctgggtgagtttcaccagttttgatttaaacgtggccaatatggacaacttcttcgcccccgttttcactatgggcaaatattatacgcaaggcgacaaggtgctgatgccgctggcgattcaggttcatcatgccgtttgtgatggcttccatgtcggcagaatgcttaatgaattacaacagtactgcgatgagtggcagggcggggcgtaatttttttaaggcagttattggtgccctggtaccgtctagtagtcgttgttcacacgatcttgttttaatgctccatccagtaaaagaactgaattctgttccgtacttgactgagtgtgtaaatttacgactcaaaatattagtacattagtattgccttgtaggttttgaagaaaatgccaatcattacttaaaaaatgtgacaatcattttttaaatatttttcagccgaattttcataacttattgatttatgaggttattgtttgtgacattctatgccaaacttttattaaaccaccaaacgttgtcgtttaatttatcagctgacgtcaggtggcacttttcggggaaatgtgcgcggaacccctatttgtttatttttctaaatacattcaaatatgtatccgctcatgagacaataaccctgataaatgcttcaataatattgaaaaaggaagagtatgagtattcaacatttccgtgtcgcccttattcccttttttgcggcattttgccttcctgtttttgctcacccagaaacgctggtgaaagtaaaagatgctgaagatcagttgggtgcacgagtgggttacatcgaactggatctcaacagcggtaagatccttgagagttttcgccccgaagaacgttttccaatgatgagcacttttaaagttctgctatgtggcgcggtattatcccgtattgacgccgggcaagagcaactcggtcgccgcatacactattctcagaatgacttggttgagtactcaccagtcacagaaaagcatcttacggatggcatgacagtaagagaattatgcagtgctgccataaccatgagtgataacactgcggccaacttacttctgacaacgatcggaggaccgaaggagctaaccgcttttttgcacaacatgggggatcatgtaactcgccttgatcgttgggaaccggagctgaatgaagccataccaaacgacgagcgtgacaccacgatgcctgtagcaatggcaacaacgttgcgcaaactattaactggcgaactacttactctagcttcccggcaacaattaatagactggatggaggcggataaagttgcaggaccacttctgcgctcggcccttccggctggctggtttattgctgataaatctggagccggtgagcgtgggtctcgcggtatcattgcagcactggggccagatggtaagccctcccgtatcgtagttatctacacgacggggagtcaggcaactatggatgaacgaaatagacagatcgctgagataggtgcctcactgattaagcattggtaa

SEQ ID NO: 71 - DNA, 11751 bp, Artificial sequence
  Synthetic
aacgtggctggcctggttcaccacgcgggaaacggtctgataagagacaccggcatactctgcgacatcgtataacgttactggtttcacattcaccaccctgaattgactctcttccgggcgctatcatgccataccgcgaaaggttttgcgccattcgatggtgtccgggatctcgacgctctcccttatgcgactcctgcattaggaaattaatacgactcactataggggaattgtgagcggataacaattcccctgtagaaataattttgtttaactttaataaggagatataccatgggtgaactgccgaataggtagctgataatagtacagcgcggctgaaatcatcattaaagcggtgaactgccgaataggtagctgataattagcgaattccgagcgaaggagatatacatatgatgcttttacaacgtccaaaatcttatccagacgaaagccttgaaagtttttttattcgtgtagcaaacaaaaatggttataatgatgttcattggtttttagtagccgttaagcgttatcttttagatatagatccaagaaagttccagacatttcccaccgatatctgttgcatcaacccttactcatccaagaaacattcaatctcgcgaacacacgcattacatcacctcagtcagttaacatttaacgaacctgtagatttactcggtatcgcgttaaacagaaaccaaatgcagttttctccgtcaacaaccgcgttaatccgtggtgcagaagtcattccacgctctcttctacgtaagggggcgattccatgttgtccctgttgtctaggtgaacacggatatgcgagttaccgctggcatttttcagggtatgaatattgtcatgaacatgacgttaagttaatagaacgctgtagttgcggggcaatttatgattaccgttatgcgggattatcaggtgtatgtactgaatgtggggaaaatatatccgcatctcaagaaaaccacgagcctaaagcgaccaggatagcatcttggttagcaggagatgatgtaaaaccattgccagatgtccctcttagttatagatgggggttcatgcattggtggtcccaaatatcaagctcatgtaaaactcgaaacaatggtgagttcttagccttttgggaacattggccaaactcctttcacaagttgattggaaaagaaatagatttcaatttcgaatactgcgttcttagtaaaaacgatttaagagtgaaagacattctagggaagattctgtttagctcaattcagcttcctgaccgtaactttcgttcgaacatcatattaaaagagatgtttcagtatatagaaacacacttatgggacgacaacggtaaactggcgaaccttcgaatgaatatgcttgagatatgtgtattgctgaactgttctcgggagcaagtgacatcaatgattgagcaaggcttactccccccaaatcgtcaacttggaaaacgagagatactcatcgttactgaatacgctttttacttgggtgatgtttattgtctttggctttcagaatttcaatctgatgagttcaatcgctctttttacctgtcgaggtggtgaatggcaacactggcagaaatattagataacaaaacagacgaccttaataaagacttaagaagagcctttagaccactctccgcacccgtagacatatcagatactcccattgaagcgctaaccatactagtgaacctaacagatagagtcatcgaacaaaaaaacctacttgatagacagaaatgtaaagacaaacttagagacgaaaaatggtgggccaactgcttcagaaccgttaaatatcgccaaagtcataacccaaagtttcctgacattagagcaaatggcgtaattcgtgccgcaccagtcgggcatttgccagcttgtatgctttcttctagtaaattacccaaaaatagctgggcttatgccaatgactctagccaaatgaataaatcctgttttttaacgagtgaatttatatggaatggtgacgttcattgcttaggtcagttgctcacagagcttgaacatccgctctggaatgttctaagaaaactcggatgttacgttaaaacagccaaatacatatcaaaggaactagcacttattcctccgttggaaattaatacttcgctagttagaaattatctggcacagatttctcttccgaacggcgaagactcatatatttctttatcacctgtggtttctcaatcaatgcaagaagattgctatcaagtattgagtgagcactatcgattttctgctattactcgatttagccgagcgacaaacatgggaactctggcaatgagttgcggagggaaattcaaaatgatccgctctttgcctccgatagaaaagtaccaacatcaccacttagactccgtaaattggcttacaaagcgctcagtcagagctatacgagactacacagagtcttccgtatgggtaatatcaccaaataaactggcacttagaaaaaaatcaatcattggagacattaaaatgatgctttcccaatggctgcgtaccactcccacgcacgaagaaaagttagatataaggaaattaacagaacgcttcaatgtcgatttagccaaaaccaagtttgcaaatcgctatgcttatgatcccctgctaactcagttgatctacaactgtataggttcaatcattcattcatcgcctcaatatgctccaaaatgtgagggaaatgacgacaaatacttgctgctaccaaatcttagaatctctggtgcatcagccatgaatacgtctgtgagtattggaataccttctatgatggcgttttatggattcgtacacgctttccagagaaatgtacaaacagctaatcctaactttaaaattgaaagtttcgccgtatgcattcacaacattcatgtggaaaaccgcggattaacaagagaatgggtcccaaacacaaaaggacaaattacagcacctgcaacacgagacgattggcagtgtgacgttgcagtaagcctgattcttcgttgcagtcattattctcagctaataccacgcgatttcatacgcttattaccgggaagaatagcaagagggaaagtgacagtttctatatccgatataaaacacttaggccgatgtttgagtttggctgatgcaatcaaagcgatacccgttgaaacaggtagatggcttagcctaaataacgaagtgaccttaaacagtattcaagatgtgattgacgagttaaaaaataacaaattacaaaccgtcaactgcattggctaccacaggttagaaaccccatgtgaaaaacgtggctcactacacgggtacaaacatgctttcgtcgaaaccatactcggtatcataaaatttctcacaataagtgaaaatacaaaccccagccaatacttttggcaatatcactattcgaagcaaggtccgattttacttcccaggagcgtatccgatgaaacttcctaatggcttgtcttatatgaaatctattgaggcttctgacgtcattttccttgttaattggccagatggaagaaagacaccgctcccatacactagccgtgttgcgttgggtatgaaagagggttccaagtctgcatacaaagatgatgggcaaattgacgcggacgtaaccgcatattctctagctcagggtaacccccacgaaatcgacttttgctgtgtaccttacggagcagagagtattgaatgcgaattttctgtttcatttgcttcgagtcttcgtaaaccatttaagtgttccgatccagaagtaaaacgaaccctagttcaattgattaagctatacgaggaaaaggtgggttgggaagaactcgccaataggttccttgagaatatttgtaatggtagatggctttggagaaataacgaatgtacatattctacatcaatcggtataaaaccttggccttgggaagacgaaaaagccattagcccattccatgacatccgaaaaaattatgctggcactaaccacttcagagatcataaagactgggataatctaatcaagttaatcactgacgctttttcccaaccgaatgggctctgtattttcgaagtcagcgctacatttcgtttaggaacaaacgctccaatttatcctagtcaagtattcaaagactctgtcaaaggtgaaaaaaaccgcatctatcaatccactgacgtagatggagagagtagtcctatactcggttgttataaaactggagcggcaatagccacgattgacgactggtatccggatgcggacaaaccaatacgtatcagccactatggtgcacatagagaagacgtttattgttatcgtcacccaaacaccgggaaagatttattcacacttttggaaaaagccgatcaatacctcgaacaacttcaggctacagatgtattgccagatgaaatgattaatgacctgcattttatcgttgcaaacttgataaaaggcgggttacttcaacagaaaggaacctaaactatggattggcactatagaaccatcacatttttacctgaatatcgaaacaatgaagcaatcgcagctaaatgtatcaaggagctccatcgttttaattacaagtacgaaacgagatccattggcgtctcgttcccactctggggccaagaaacggtgggacgtaaaatcacctttgttagtaccaataaaatggaattggattttctgatatcacgaaggtatttcgtacaaatgacaaaacttggttactttagcatttccacaacacaaactgtcccagacgattgttcttatgttctatttaaacgtgcacactctatagataaaggaacatctgcgggccgagcgagggagttaaaacgacttgagcgaagagctttagaacgcggcgaaatatttgaccctatagcttattccaaaaccactagtcatgcattccaaagctaccactcactggaagaagatagcagcagtggcaataagttccgactgaatatacaaatgaaggaaaggtcaggaactgtaggtactggaaaatttagcagctatgggctaggcaataccgataattcattgcaggttgttcctttgatttaacctttaataaggagatatagcatgaaaaaacgaatcattaaaaactccaaagttaagaacatttctcgttttgtaagcttgaagacagattcagttcaaacaactgaatctgatcttgagtttgatgcatgttttcattttgaatttgcctcacacgtaaaatcatttgaaacacagcctctgggttttgaatatcgattgaatgggcggttacgtcgttatactcctgatatgctctgttatttcaatgatggctatgcgacatattatgaagtgaagcctaagtgggtaactgaacgggatgaatttaagaaaaaatttgatgcacagaaacaacaagctattgctaacggatatgacttacttgttctgactgaagatgacattcaaacttatcctttgctggacaatctgaagatcattcatcgctacgcttgttctgatagtcttgataatgtgcaggttaggatcttaaagttatttcaaaactacggcgaaatgcgaatctcgcaagtaataaacgccagtcaggggcagtctgcatctatattgcctgcgctctatgatttgatcgccaaaaaaatcctagagtttgattggcactgtccaatcagtcatgattctcttgtctggagagtttcatgagtgatgactctgaaaatctttatgcttttggatcctttttcccagagaaacactcgaatacttcggtgcctaagacatcaaagggcacgcgattcgggattgaactgcaagaaagttatcaagatcttttttcattcgatgaaaaacgcagagatgaggctattcatcgatacaacatattagattatcttattgaactgcacggccctagtttaaccttaaagaaaatatcaggttcgatgaagggtcttgcagataaatttcaccccaatgtaccgtctgcaccatcaatatatcgttattggactacgtttaagaaatctgggtttgtactttcttcgttgattcctggggtaacgagaggtaatacaaagcaacgaaaaaccttggaactggaagagtatatagagagagctataaaatcatatttttcggcagagtcgccaacaattcaacaagcctttacgttattagaaacggaaatagatagacataatgagtgtaatgacacccaattatcttttgaatatgaatcctttagaaaaagaattgtaaaaaaaacagattatgaaagactgctaattaaaaaaggtaaaaaagccgccgatacatactacaagaaagtcggacaacgaccggaaacgactcgggttttgcagcgtgtcgaagcggatcatactcgcctagatttgtttgtgattgatgatgctcgtaaacttcctcttgggcgcccgtggcttacattactttttgatactcatactaaaagtgtcgttggtttctatcttgggttcgagccaccaggttatttatcggtttctctagccctagaaaatgcaattttacctaagtattacgttaaagagttatatccagaagtaaaaggggagtggccatgctatgggttaccagaacaccttattgttgataacggtgctgagtttaatagtaaagactttgtaaccgcttgtaaaaacttacgaattaaggttaaaaagaaccccgttaaaaaaccttggctgaaaggatctgttgaacggtattttcgaactatcaacaataaactgctttctggaatcccaggtaagagcttcagtaatatcttcgctcgcggcgattataatccacaaaaaaatgcgattattacccgttcagatttgatgaaagttatccatgtttggcttatcgatatataccaatctagccctaatggtttggaaaataatatacctaatctttcttgggctgatgctatgcgtagtgcttttccacctcgctcctttaatggttcaatagatgaactaaggtttaatcttgggaaacatgttgagatttctctcgatagaaacggtattcgccttaaaaaaacactgcgttatacaagttcatatcttgctcagtatttcggaaagcatacatacgatggtaagagcattaaggtaaaaataaaatataatcctatttgtatgggcaacatatacgttctggatgaagataaacacgaattttttgccgtagaatcagttgatcctgactacgcttattcagtatcagagtggcttcacaaagtgtgttgcgattatgcacgaaaccatataaggaataactatagacataatgatgttattaaagcctggagagtgatatacgatatcatcgatgaagcactgcacctatctggcaacggtaagcaggctaatgttgggattagacaagcctctaaacttgaaagggtgcgtgagcatgctgagcggaccaaatctcatcaaaaaccagagttgcacatgtcgagtaatgacgatattgattgggacgttgaagtgaatactgatggctggaaaattgattcggttcgaggtacaaataaatgaatcattttgcaagagcaccccaccaacaggtgaagagtatttttattagtaattctcagatagatgaaattctctcggacatagaggaatgtcgagaggagagtgatggtatatcggaaccagaatgtctaattgttgttggtgatagtgggtcaggcaaaaccactattatagataaatatttagtcgacaacccaaggatggaagctaatgatggttctatcattcccattttgttcacttcgttacccgcaaatgccaatccagttaccgcctcggaaaggctgttatcttcgatgggagatccgttagcatttagtcatggaaaagatcccgccgagttgatgaaaatagtcaatgatttgcttcgcgagtgcagagttgaactcattatcatagatgagttccagcacatgattgaccgcaaaagcaaggatgtacttcatagcacagctgactggttaaagatgataatcattgattcaaaaatacccgttgtactttttggaatgccttattcaaccgagattttgcgggtcaacaatcaattacgagggcgttttgaatctcaacaccatttaaagccattcagggtcaaagacacaagtgagctaatcagatacaaaacatttatgacgatgttagatgcagcgttaccctttttagaggaatctggattggcatctgaagacataatgaaaagggtgtatattttttccaagggaaacatgcggttaattcggcgtttgatcaataaagcagctaaatttgctttgctagaaaatgctccgtgtatttctttaaagcattttgcacgtgcggcacccaaagtgagtcgggatgcttgtaaatcatttaacccatttgatacagataccaaaaaactaaaaattattgaaccaccagaagatgttggttgggaaaattatcttgctgcaaaaggagattgacctaggctgctgccaccgctgagcaataactagcataaccccttggggcctctaaacgggtcttgaggggttttttgctgaaacctcaggcatttgagaagcacacggtcacactgcttccggtagtcaataaaccggtaaaccagcaatagacataagcggctatttaacgaccctgccctgaaccgacgaccgggtcatcgtggccggatcttgcggcccctcggcttgaacgaattgttagacattatttgccgactaccttggtgatctcgcctttcacgtagtggacaaattcttccaactgatctgcgcgcgaggccaagcgatcttcttcttgtccaagataagcctgtctagcttcaagtatgacgggctgatactgggccggcaggcgctccattgcccagtcggcagcgacatccttcggcgcgattttgccggttactgcgctgtaccaaatgcgggacaacgtaagcactacatttcgctcatcgccagcccagtcgggcggcgagttccatagcgttaaggtttcatttagcgcctcaaatagatcctgttcaggaaccggatcaaagagttcctccgccgctggacctaccaaggcaacgctatgttctcttgcttttgtcagcaagatagccagatcaatgtcgatcgtggctggctcgaagatacctgcaagaatgtcattgcgctgccattctccaaattgcagttcgcgcttagctggataacgccacggaatgatgtcgtcgtgcacaacaatggtgacttctacagcgcggagaatctcgctctctccaggggaagccgaagtttccaaaaggtcgttgatcaaagctcgccgcgttgtttcatcaagccttacggtcaccgtaaccagcaaatcaatatcactgtgtggcttcaggccgccatccactgcggagccgtacaaatgtacggccagcaacgtcggttcgagatggcgctcgatgacgccaactacctctgatagttgagtcgatacttcggcgatcaccgcttccctcatactcttcctttttcaatattattgaagcatttatcagggttattgtctcatgagcggatacatatttgaatgtatttagaaaaataaacaaatagctagctcactcggtcgctacgctccgggcgtgagactgcggcgggcgctgcggacacatacaaagttacccacagattccgtggataagcaggggactaacatgtgaggcaaaacagcagggccgcgccggtggcgtttttccataggctccgccctcctgccagagttcacataaacagacgcttttccggtgcatctgtgggagccgtgaggctcaaccatgaatctgacagtacgggcgaaacccgacaggacttaaagatccccaccgtttccggcgggtcgctccctcttgcgctctcctgttccgaccctgccgtttaccggatacctgttccgcctttctcccttacgggaagtgtggcgctttctcatagctcacacactggtatctcggctcggtgtaggtcgttcgctccaagctgggctgtaagcaagaactccccgttcagcccgactgctgcgccttatccggtaactgttcacttgagtccaacccggaaaagcacggtaaaacgccactggcagcagccattggtaactgggagttcgcagaggatttgtttagctaaacacgcggttgctcttgaagtgtgcgccaaagtccggctacactggaaggacagatttggttgctgtgctctgcgaaagccagttaccacggttaagcagttccccaactgacttaaccttcgatcaaaccacctccccaggtggttttttcgtttacagggcaaaagattacgcgcagaaaaaaaggatctcaagaagatcctttgatcttttctactgaaccgctctagatttcagtgcaatttatctcttcaaatgtagcacctgaagtcagccccatacgatataagttgtaattctcatgttagtcatgccccgcgcccaccggaaggagctgactgggttgaaggctctcaagggcatcggtcgagatcccggtgcctaatgagtgagctaacttacattaattgcgttgcgctcactgcccgctttccagtcgggaaacctgtcgtgccagctgcattaatgaatcggccaacgcgcggggagaggcggtttgcgtattgggcgccagggtggtttttcttttcaccagtgagacgggcaacagctgattgcccttcaccgcctggccctgagagagttgcagcaagcggtccacgctggtttgccccagcaggcgaaaatcctgtttgatggtggttaacggcgggatataacatgagctgtcttcggtatcgtcgtatcccactaccgagatgtccgcaccaacgcgcagcccggactcggtaatggcgcgcattgcgcccagcgccatctgatcgttggcaaccagcatcgcagtgggaacgatgccctcattcagcatttgcatggtttgttgaaaaccggacatggcactccagtcgccttcccgttccgctatcggctgaatttgattgcgagtgagatatttatgccagccagccagacgcagacgcgccgagacagaacttaatgggcccgctaacagcgcgatttgctggtgacccaatgcgaccagatgctccacgcccagtcgcgtaccgtcttcatgggagaaaataatactgttgatgggtgtctggtcagagacatcaagaaataacgccggaacattagtgcaggcagcttccacagcaatggcatcctggtcatccagcggatagttaatgatcagcccactgacgcgttgcgcgagaagattgtgcaccgccgctttacaggcttcgacgccgcttcgttctaccatcgacaccaccacgctggcacccagttgatcggcgcgagatttaatcgccgcgacaatttgcgacggcgcgtgcagggccagactggaggtggcaacgccaatcagcaacgactgtttgcccgccagttgttgtgccacgcggttgggaatgtaattcagctccgccatcgccgcttccactttttcccgcgttttcgcaga

SEQ ID NO: 72 - DNA, 12002 bp, Artificial sequence
  Synthetic
aacgtggctggcctggttcaccacgcgggaaacggtctgataagagacaccggcatactctgcgacatcgtataacgttactggtttcacattcaccaccctgaattgactctcttccgggcgctatcatgccataccgcgaaaggttttgcgccattcgatggtgtccgggatctcgacgctctcccttatgcgactcctgcattaggaaattaatacgactcactataggggaattgtgagcggataacaattcccctgtagaaataattttgtttaactttaataaggagatataccatgggtaacctgccggataggcagccaagaatagtacagcgcggctgaaatcatcattaaagcggtaacctgccggataggcagccaagaattagcgaattccgagcgaaggagatatacatatgcttaatccaatagagctttatgaagatgaatcgctagagagctgtttattaagaatcagtcagaataattactatgattcttttcaggattttagcgatgaagtttggttccaagtcaaagaagaagatcgtgaggttcgtggaactttccctgcaaccctaaatacgataaatctctatcactctcacacatcaagtaacttaaagctcaaagtactaatcaaaattgagcagtggcttgagattaataacttccctttattaaaaagcgccttgagcagatcaagcaatactttcttacgccaacattctgctgtttttagaaatggtgttgatataccaagaatcctgctcagaaaaaatggtattccagtatgccctgagtgcctaaaagagaacgaatacatacgtcaagaatggcacttcatcactcatgatgtatgcaccaaacataaaacagatctattacattactgcccagagtgtaaaacctctattaattatcaagaaagtgaaaacattacggattgtcagtgtggattcaaattcagtgatcacttagctccgcaagcaaatagtaatgctttactcattgcacaatggcttaacagcgaaaacactaagctggctaatgtttggggagagcaccaagcaatatcatctcgctttggtgtcttactttggtatatcaatagatataatctaacggatgatttttctacttcatttgtaaaatattcattaaattggcctactaatttctattccgaactcgatgagcaaatagataaagctaaaacagttcagattaaaccttttaataagatattttttaatgaaattttcaatagtcttttattagattgccgacacttgcctactcgcgaatttaaaactaattccatattgagtcatatatatcagtactttctatctcgctatcaaattcaacctaactctgatgttttctcaatcttgctaagccccttagaggcatcgagcttgctttcttgcactaccgatcaaatctatcgtttatatgaattaggttttcttaagttaggcgttaggccaaaactgcatcaaaaaatagcaagtcaccaatcagtttttacactctcaagtattattctagtcaaactttcaaacatgcaatccagtcaagatgaattgcatcactacctttcagcgtggtaactaatggaatttacagatattctcatcattcaagatgtaaaggaacgcaacagagctttcaaggttgcatttgctcactactcttcagctatttgtattgatgatcatgaaatcgaagcgattacatgcctacttaatttgtgtacgccaaaaacggaggattacctagacaaaactagcgcatctctgtttttaaataatcatgataatattcaaaagtgtcttgacgaactcaagtggttccatagtcacaatgttaagtatccagattgccgagttaaagggcgaaacattatttctctaccaatcgattcagtaaataacacaataaacagtaatgtagtcccttatcgattaggttggtcccatgacagtggaaaggtcaactatactcattttctactctcttgctttaaatggagaggaaaacaaacaactcttagtcaattattcgtaaccgacacgctgttttggttagacatcataaaaaaaatacaatgtaactggaccaagaaacaagctgagcaatttattcattccatacaaaaagaaatacctgcaaaaacacttccagagaacatcagtccatattcaaaacagatcttatttccatataaaaatgactatctaactttaactccagtaacttctaattcagttcaaacatggttagaacaccaatctaggaaacctaatgatattcgctggattaaacgagaaagtaagcaccctgctagtgtaggcgctttatcatcttctatcggtggataccatagcttaatattttcgccaccaagcacatcacaatcaccacactcgtatcacgataatatgactagcaaaactgaatgtagagaagccttttgtgcttcagctatcactgagaaaagtacgactgacgcattacaaaggctcatcagttctgaagtaagaatgaatgtgaaacatagaaaacaaatcagaaaatcaggagttcatttcattagacaaaaaatagctctttggcttactcctctgattcgatggcgagatcatatagataataaccagatacaaatcactaatgaccatccatcattagttaacctattcttgtcgtctcctattgctaattttcccgacttattaacgccattgcataatcacctaaatcaaactctaggaaagaataaatacacaaaacgctttgcttatcaccctgatttaatgcctattttcaaatcacaactttcatgggttctgaataaactggcacaagataaaaatataaatcagcagccagcccttccaaggacccaatttatccatcttaaaaatttaaggctatacaatggcaatgcgttaagctccccctatgtttgtggactaccttcactaactggtttttggggatttatgcatgactttgaacgaagattaaaaacaaagattgaagagaacattcattttgaagccttcagcctatttgttcatcaatatgaattacaatcatctcctccgctctgtgaagcatcggatgtttataaaaaaagagaactatcacctgcaaaacgtttattaacgcaaccttcttattcttgtgatatgcgttttgacctcattatcaaagttcacactgaggttaatttaagcgatattagtcaacgtatgctatcagcaatgcctgctcgttgtgttggtggcacgttacatcaaccttcgttacatgaaagtttagaatggcttacaagctatgtatcttctgaacacttatttgaagagttagctcgccttcctaactcaggtcgctggatatacccaccatcggaaacatttaacactccagatgaatttctttctatattggaaaatagcacacaccttgctatttgtaatggttattcatttcttgaggacccaacaaatagagagaatgtgagccttaatcaacacgtattttgtgaacctttaattggattagcagagcaagtaatacctatagatatgagacttaaccgacaaaaacattatttttcaaatgctttttggtcgatcaatagtgatttcaattctattcttattcaaaagcatgagtaaggatacgctatgaagctttgtaataatctaaactacactcgatcattgtcaccgggaaaggctgttttttattatgaaagtaaagatggtcagatgaatcctattaagtgtgagcaaactcatttaagagcgcctaaagctggattttcagaagcctttaatagcgattactcaactaaaaacactgccccacaagatctctcctttagtaaccctcaatttattgaagagtgttatgttcctgttggtatagatgaaatcaaaatccgattttcattacgtatagaagcaaattcattacaaccagataaatgctctgatattcaaattagagagatattgcaagcctttgccaccaaatataaagaaaatggcggctatcaagaacttggtgaacgatacgcaaaaaacttactttctggtacttggctatggcgaaatgagcataatctaggtacaagtattttaataaaaacaacaagtaaccaagaatttaatatcgatgatgcctttaagctatcaagaaaagcctcagctaaagataaaaaaacaatatcaaagttaggaagtgaaatcgccattgcactatctgaacctgatcattattactttgccgatattacggcaacgatcaatgtagccttttgccaagaaatttatcctagccaagagtttttagatactaaagaaaaaggtaaaccaagcaaagtgtatgcaaaaacgtcacttctaactggtgagaaaaccgttgctttacatgcacaaaagattggagctgcaattcaacttatcgacgattggtgggctgatgatgccgatattcccttgagagtaaatgagtttggtgctgatcatcacaatatcatagccagaaggcatccctcacatcgcaatgacttttacaccttaattcaaaacgctgataactactgcgcgcaactggatgaaaattcagatattactgatgatatgcattacgttatggctgtattagtaaaaggaggactgtttcaaaagagtgcttcttcaaaaaaaggaaagtagatgctcactcattattttagtattacgtatgtgcctgatgattgtgataatgagttattggcaggacgttgcatcgctgaatttcacaagtttatctctagtctaaggctgatagaaaacaactcttttgccattggcttcccaaattggtccgaacaaagtgttgggaatgaatttgctattttttctaataactctgaattattaagtgccattaagtaccagccctatttcaatttaatgaagaatgaggaattattttctattacagacatcaagcctgtgccaaataatcttcctcaaataagattcatcagaaaccaatctattgggaaaatatttataggttcaaaaaaacgtagaatccagcgttcaatcacaagaaataataaagagcatacacctatatcaaatgaggacagagagtttgatacctttcacaaagtgtcgtgctctagtaaaagtaaacagcaacaatttattcttcatattcaaaaaggcatcatcccgaggactacagactctagcaatagctacaatagttatggcttagcgacaaataataaacatttaggcactgttcctgatttatcaaaaatacctttttattacgaggacaaattatcaaataaagatcagtaacctttaataaggagatatagcatgtacgttcgtacactaaaacaatctcaagtaaaaaacattagcaaatttatgagcctgaagaatgattcgatcattcgtacagaatctatgctcgagtttgatatgtgctttcatcttgaatattctcctgatgttgttagctttgaatctcaacctcaaggctttcattacgaatatcaaggaaaacgcctcccctatactccagattttctcattacacattcatctggacaacaacaactacttgaagtcaaacctctttctaaaacccaacgtcccgattttcaatcaaaattcatccaaaaacaacaagcagcccagaagttaaatctttcattaatccttattaccgaaaagcaaattagaacaggtcatttactcaataattttaaacttctacatagatactctggactacatagtatttctgttactcaaaaagcaattattcacctcattcagaaagtaaataaaattcaaattaatcaaattgcaaacagcttaaacattagtaacggagaagcattaacaggtgttttaagttggctgtcaaaaggggcacttcaaactgattactcaaatggagtgattaatggcaactcgtatgtgtggttataactatgagttttccatttaacgatgaatttcaagagattatcgaggtttctggcgagcaaaataaaatcattcataatgaagaaacaaactcccttctattatcccttgattcatatagtcataacataaaaatggaagtactacgccgtatttcctttattaagtggatcaagccacgtttaaaaggtggctggacacaaaaaaacttaaatcctcttcttgatgatgcagctacacaattaaaaatgatagcccctaactggcgaactcttgctgagtggcataaaaattaccattcaagcgggaatgacatctcctctttaatcccaaagcactcaagtaaaggtaatattcaacagcatactgatagcgattttttgataatgaaagcaattaacgaaaaatacttaacactaacccgatgctctatcagtcaaacttttaagtactattgtgatttagtaataatagaaaaccgttccttgcctgaaaagaaaatcaaatctgtcagtcaacgtactttttacaaccgaatcaatgcactacctaaatatgatgtgactttaaaacagtatggtaaacgatatgctgatattaattaccgaaccgtagatagaatggtaaatgtaacaagacctttagagcgagtagaaatagatcacacacctcttgatttaatcttactggatgacaacttagagataccattaggtcgtccatacctaacaattttaatcgacagttatagcaaatgcattgtcggctataaccttagtttcaggcctcctagctttgaatctattcgtcacgctttttgcaatgcctgccttgataaatcatctattacacaacaataccctcaccttcaacaggattggcctatttccggaaaaattgaaaatcttgttgtagataatggtgctgagttctggagtaacagtttagaagatagcctacgccccttcgctaccaacattttatttaataaagttggtaagccgtggatgaaacctcttgttgaaaaattttttgatgtattaaataaaggcttggtgcattcacttcccggaacaactcgctcaagaatagaacaactaaagggatataaccctaaaaaagatgccgcgattacattcagtctatttttagaactatttcatacgtggattatcgacatctatcacatgagttccgatacaagagagactgctgttccttactttaaatggcaagaaggagtaacagccttaccccctctcacctatacagatgaagaagcccaacaattacgaattgaacttgggatattaaatactcgaactgtacgtattgggggtattttcctttatggattacgttatgaatcagaggagctaaatgaatacagaaaaatttggggtgcgattgataagaataacctaacgctgaaaacaaaaaccgatccttctgatatatcaaatatttttgtctatttaactaatgaatctcgctatattaaagttccttgcataacagatattagctatacatcaggccttacgttatttcagcatcaaacagctcaaaaattacaaagaactaaaacaagattacaaatagaacatgaaaaactcgctgattcacgtatatatgttgaaaatagaattgcggaagaagtagaaaaaatcaaatctagtaaaaaacgtactacgaaaactactcatgcatcaaagatagctcggcaccaagatattggtagtcatactcaaaaatcgattcaaatacctaatgagcaaagcgataccaaaaatgaacatgatgttttgaatgggtgggatgaacaatttgatgatttagagggattttgatgcacactttatcttcaactcaaaaagagcaactcatcagctttaatcaatgctttattgagtatccaataattactcatatctactctatttttgatgatttacgaatgaatcaaggtttaggtgcagaaccgcaatgtatgctcttacttggtgatactggctcaggaaaatcagcactcattaataactacctgttacaacaaccgccatcaaatttttccgcactcagttcattacccgttttacatacacgtatcccacgtagagtgaataacgaacaaaccatgtatcagttgttaactgacttaggacaatcaccttcaggttcgagacgtgcaaagcgatctgagatcgctctcgctgaaggagtagttcgagctttacagcgtaaaaaaacagaactcattattattaatgaatttcaagaactcatcgaattttcaagtgctaaagaacgtcagaatgtcgctaacacgcttaaatacattagtgaagaagctagagtatccattgtgttagttggtatgccctatgcagatattatttctgaagaacctcaatggggatctcgcttagcatggaaaacacaaatagaatatttttcattaaaaaatgacatgaaaacctatgttcaattcctaaaaggcctagcaaatcgaatgggatatgatgaggtgccatcactacacaataaggagtttgctattccactgttttcaatttgtaggggtgagctaaggcaactcaagaacttctgctctgatgcgatgctagaaagttttaagcaaaacaaaaacacattaactcatgatgttttaagtgccactttcaaatacaaatacccaacgaagaaaaatccatttgaaatgaatgtagctgacattccaattcaagaggtagagtcttattcaaagtataatctaaacgcaatgactgatgatgaacgccttactgcaactaagtttctcgatgctatgtctttatcttcactattgagtaagagttaacctaggctgctgccaccgctgagcaataactagcataaccccttggggcctctaaacgggtcttgaggggttttttgctgaaacctcaggcatttgagaagcacacggtcacactgcttccggtagtcaataaaccggtaaaccagcaatagacataagcggctatttaacgaccctgccctgaaccgacgaccgggtcatcgtggccggatcttgcggcccctcggcttgaacgaattgttagacattatttgccgactaccttggtgatctcgcctttcacgtagtggacaaattcttccaactgatctgcgcgcgaggccaagcgatcttcttcttgtccaagataagcctgtctagcttcaagtatgacgggctgatactgggccggcaggcgctccattgcccagtcggcagcgacatccttcggcgcgattttgccggttactgcgctgtaccaaatgcgggacaacgtaagcactacatttcgctcatcgccagcccagtcgggcggcgagttccatagcgttaaggtttcatttagcgcctcaaatagatcctgttcaggaaccggatcaaagagttcctccgccgctggacctaccaaggcaacgctatgttctcttgcttttgtcagcaagatagccagatcaatgtcgatcgtggctggctcgaagatacctgcaagaatgtcattgcgctgccattctccaaattgcagttcgcgcttagctggataacgccacggaatgatgtcgtcgtgcacaacaatggtgacttctacagcgcggagaatctcgctctctccaggggaagccgaagtttccaaaaggtcgttgatcaaagctcgccgcgttgtttcatcaagccttacggtcaccgtaaccagcaaatcaatatcactgtgtggcttcaggccgccatccactgcggagccgtacaaatgtacggccagcaacgtcggttcgagatggcgctcgatgacgccaactacctctgatagttgagtcgatacttcggcgatcaccgcttccctcatactcttcctttttcaatattattgaagcatttatcagggttattgtctcatgagcggatacatatttgaatgtatttagaaaaataaacaaatagctagctcactcggtcgctacgctccgggcgtgagactgcggcgggcgctgcggacacatacaaagttacccacagattccgtggataagcaggggactaacatgtgaggcaaaacagcagggccgcgccggtggcgtttttccataggctccgccctcctgccagagttcacataaacagacgcttttccggtgcatctgtgggagccgtgaggctcaaccatgaatctgacagtacgggcgaaacccgacaggacttaaagatccccaccgtttccggcgggtcgctccctcttgcgctctcctgttccgaccctgccgtttaccggatacctgttccgcctttctcccttacgggaagtgtggcgctttctcatagctcacacactggtatctcggctcggtgtaggtcgttcgctccaagctgggctgtaagcaagaactccccgttcagcccgactgctgcgccttatccggtaactgttcacttgagtccaacccggaaaagcacggtaaaacgccactggcagcagccattggtaactgggagttcgcagaggatttgtttagctaaacacgcggttgctcttgaagtgtgcgccaaagtccggctacactggaaggacagatttggttgctgtgctctgcgaaagccagttaccacggttaagcagttccccaactgacttaaccttcgatcaaaccacctccccaggtggttttttcgtttacagggcaaaagattacgcgcagaaaaaaaggatctcaagaagatcctttgatcttttctactgaaccgctctagatttcagtgcaatttatctcttcaaatgtagcacctgaagtcagccccatacgatataagttgtaattctcatgttagtcatgccccgcgcccaccggaaggagctgactgggttgaaggctctcaagggcatcggtcgagatcccggtgcctaatgagtgagctaacttacattaattgcgttgcgctcactgcccgctttccagtcgggaaacctgtcgtgccagctgcattaatgaatcggccaacgcgcggggagaggcggtttgcgtattgggcgccagggtggtttttcttttcaccagtgagacgggcaacagctgattgcccttcaccgcctggccctgagagagttgcagcaagcggtccacgctggtttgccccagcaggcgaaaatcctgtttgatggtggttaacggcgggatataacatgagctgtcttcggtatcgtcgtatcccactaccgagatgtccgcaccaacgcgcagcccggactcggtaatggcgcgcattgcgcccagcgccatctgatcgttggcaaccagcatcgcagtgggaacgatgccctcattcagcatttgcatggtttgttgaaaaccggacatggcactccagtcgccttcccgttccgctatcggctgaatttgattgcgagtgagatatttatgccagccagccagacgcagacgcgccgagacagaacttaatgggcccgctaacagcgcgatttgctggtgacccaatgcgaccagatgctccacgcccagtcgcgtaccgtcttcatgggagaaaataatactgttgatgggtgtctggtcagagacatcaagaaataacgccggaacattagtgcaggcagcttccacagcaatggcatcctggtcatccagcggatagttaatgatcagcccactgacgcgttgcgcgagaagattgtgcaccgccgctttacaggcttcgacgccgcttcgttctaccatcgacaccaccacgctggcacccagttgatcggcgcgagatttaatcgccgcgacaatttgcgacggcgcgtgcagggccagactggaggtggcaacgccaatcagcaacgactgtttgcccgccagttgttgtgccacgcggttgggaatgtaattcagctccgccatcgccgcttccactttttcccgcgttttcgcaga

SEQ ID NO: 73 - DNA, 12031 bp, Artificial sequence
  Synthetic
aacgtggctggcctggttcaccacgcgggaaacggtctgataagagacaccggcatactctgcgacatcgtataacgttactggtttcacattcaccaccctgaattgactctcttccgggcgctatcatgccataccgcgaaaggttttgcgccattcgatggtgtccgggatctcgacgctctcccttatgcgactcctgcattaggaaattaatacgactcactataggggaattgtgagcggataacaattcccctgtagaaataattttgtttaactttaataaggagatataccatgggtgacctgccgtataggcagctgaaaatagtacagcgcggctgaaatcatcattaaagcggtgacctgccgtataggcagctgaaaattagcgaattccgagcgaaggagatatacatatggcttttctattttctcccaaggctcgggcattttctgacgaatcgctggaaagttacttgttacgggtcgtttcagagaatttttttgactcgtatgaagggctcagcttagctattcgcgaagagctgcatgagcttgattttgaggcgcatggtgcattcccagtagatttaaagaggctcaatgtttaccacgccaaacataatagccattttaggatgcgggctttaggactactcgaaacactactagatttacctcgatacgagctacaaaagttggctttgctaaagtcagatattaaatttaactcctccgtcgctttatataacaatggcgtagacattcccctgaggtttattcgtcaccacgccgaggaagctgttgattcgattccggtatgctcacaatgtcttgcagaagaagcctatataaaacaaagttggcatataaagtgggtaaatgcatgcactaaacatcagtgtgctttgctacataactgcccagaatgctacgctccaattaactatatcgagaatgagtcaattactcattgttcatgcggttttgagctgtcttgcgctagtacctcgcctgtaaatacgttaagtattgaacatttaaataaattactggataaaggtgagcgcaacgatagtaacccgctatttaacaatatgactcttacagaacgttttgctgcgcttctttggtatcaggagcggtattctcaaacagataacttttgtttaaatgatgctgtgaactattttagtaaatggccagcagtttttaatacagagcttgatgaactaagtaaaaatgcagaaatgaagttaatagatctgtttaataaaactgagtttaagtttatttttggggatgctattttagcttgccccagtactcaaaagcagagtgaatctcactttatttatagggctctattagattatttagttactttagttgagagtaaccctaaaactaaaaagcccaacgcagccgacttattagtaagtgtattggaggctgcaactttattaggtacttcagtagagcaggtttataggttgtaccaaaatggtattttgcaaacggcatttcgtcataaaatgaaccagcggatcaacccttataagggcgcgttttttttaagacatgttatagagtacaaaaccagttttggaaatgacaaagctagaatgtatttgtcggcatggtgagtatatgcatcttaaggaactgctagagattacagacaccactgagcgggataggtcattacgtcgtgcttttagcccttatacggcaatgattgatataacaggcagcgaagccgttgccctgattattttgttaaacctgacttatcgaaaaaaccaagttgatgacttgctggataaaaagctcgcaaaacaggctttaaaaagtgaagaccatattaataaatgtattaaggaaatagcgtggtttcatactcataatttaaagtaccctgacattagagtcagtaagcaaaatttagccgtagagcctccaacactgcactcttatgttttgagtagtgctaactatcctaaagcctatggctggtcacataactcagctaaagttaattttgctaaattatttgttagttactttaaatggcaaaatcaagtcagttggctggcacaagtattagctacgaactcggataactggaaatccgcatttacctctcttgggttatccgttaaggcatttaaaagtttatgtgtaaccgttaaaaattcattgcctgaagaggccattcccgactctgttgaccgctactctcgccaaattagaatgccttatcatgatggttacttagctgttacgcctgtaattagccatgttgttcaatcaaaaattcaacaggcggcaattgataaacgagcccgatttagcaatgtagagtttacgcgtcctgctgctgtcagtatgttagctgcttccttaggtggtgttattaatgtgcttaattaccctccttatatacgaagtaaatatcatggtttaagtaactcacgagcatttaaattaaataatgggcaaacagtatttaacgttgaggcactattaaagccggaattaattaaagccttagaaggtattatatttagtaataatgcgctggctcttaaacagcgtagacaacaaaaagtaaaaaatattaaagagctgagaaacacgcttttagaatggttttcacctgtatttgaatggcgcttggacgctattgagaatgggtatgacttagaacagcttgagagtgcttcagagcgactagagtataaaatactatcgctacccgacaatgaactcccttcgctaacgattcctttatttaggttactaaatgaaatgcttggcggtgtgagcatgacacaaaggtatgcttttcatcctaaattaatgagccctttaaaagcagctttacaatggttgcttgttaatcttacagatcaaaaacatgtactgattgaagaagatgatgaacattatcgctatcttcatttaagcggtatacgtgtgtttgatgcgcaagcattatcaaacccttactgctcaggtattccatctttaaccgctgtttggggtatgattcacagctaccaaagaaaacttaatgaggcgctaggaacaaatgtacggttcacatccttttcttggtttattaggaattattctgctgtagcaggaaaaaaacttcctgaactgagccttcaaggcgctcagcaaagtaggctcaagcggccaggaattatcgatggcaaatactgtgatttggtatttgatttaataatacacattgatggttatgaagatgacttacaggcagtagatagtaagcctgacattttgaaagcgcattttccatctaactttgcaggtggtgttatgcatcagcctgagcttaactcaaatataaattggtgctgtttatatagtaatgaaaatcagttatttgaaaagttaaggcgactccctttatctggttgttgggttatgccaactgagcacaaaatacaggatttagatgagctactcttattattaaatagtgactctaaactaagcccatctatgatgggatatatgttactcaccgaaccgatggctagagttggatcacttgaaagactgcattgttatgctgaaccagcaataggagtggtgaaatacgaagcggccactagtgtaaggctaaaaggtattggtaactattttaatagcgctttttggatgctagatgcacaagaaaagtttatgctaatgaaaaaagtttaaccggaaaatacttaatggagctctgtaatatattaaaatatgatcgctcgctttaccctggtaaagctgtgtttttttataaaacggctgactctgattttgttccactagaggctgatattaataaaattcgaggccctaaatctggttttactgaagcattcaccccacagttttccccaaaaaacatctcacctcaggacttaacacataataatatattaactctcgaagagtgttatgtacctccaaatgtggagcatatattttgtcggttttctttgagagtacaggctaactcgttggtcccttcaggctgtagtgatccagaggttttttctttattaaaagagttggcagaaacatttaaagaatgcggtggttataaagaactagcagtaagatattgtcgaaatattttgataggtacatggctttggcgtaatcaaaacaccggcaacactcaaattgaaattaaaaccagcaaagggagttgttatttaatcgataacactcgtaagttagcttgggaaagcaaatgggcttctgatgatctaaaagtattggaagagcttagtaatgaaattgagagcgcattaactgatcccaatgtgttttggagtgctgatataaccgcgaaaatagaagcctcattttgccaagagatttacccaagccaaatccttaacgacaaggttaagcaaggagaggcctcaaaacagtttgtaaaagctaagtgtgcagatggccgttacgctgtaagttttaattcagtaaaaataggagcagcccttcagtcaatagatgattggtgggatgaggatgcaagtaaaagattacgagtgcatgagtttggtgctgataaagaaataggggttgcccgacgtcctcctgattctgaacagaatttttattctattttcaaaaatacggaatggtatttgtcagcccttaaaaattgcattactaataaaaatgaaaaaatagacccagctatttattacttattctctgtattgattaagggcggaatgttccagaaaaaagcagaggctaaaaaggcgtaattatgcaaaggtattacttcacagtccactttttaccaaaacaagctaatctagcgctgcttactggccgttgtatttctattatgcatgggtttattttgaagcataatattgaaggaatgggggttacgtttcctgcatggtcggactcatcaattggtaatgaaattgcttttgtttacacggacaaggagattttaaatacccttaaagatcaggcatattttgtggacatgcaagattgtggcttttttaaagtaagccaagttttagctgtacctgacagctgcgaagaagtacgttttatacgtaatcaggcggtagcaaaaattttcacaggtgaaagtagaagaagattaaagcgcctgcaaaaaagagcgttagcaagaggtgaagattttaatcctaaaaagatcgaagctccccgagagattgatattttccatagagtggctatgactagtaagagttcacaagaggattatattctgcatattcaaaagcaagatgttgactgccaagctgagccatactttagtaattatgggcttgcctcaaatgaaaagtttaaaggcacggttccggatttatcaccctcaatagatagaaattaacctttaataaggagatatagcatgtatatacgcaacttgagaaagccatctccaaataaaaatgtatttaaatttgcgagcactaaagttagtagtgtagttatgtgtgagagttcattagagtttgatgcatgttttcatcatgaatataacgatttgatagagagttttgggagtcagcctgaaggctttaaatatgagtttatgggtaaaagtttaccttacacaccagatgcactgatttcatatacagataaaacccaaaaataccacgaatataagccctattctaaaattgcttctccactatttagagctgaatttgctgccaaaagagctgcatcattaaaattggggattgatcttgttttagtaactgataggcaaattagggtaaatccaatattaaacaacttaaagttattacaccgctactcaggtgtttatggtatcagcggcattcaaaaagagttgctcagttttattcataaatcaggggtaatcaagctaaatgatataagctctcaggttgggataccaattggtgaaacacgatcttttttatttgggctcatgcataaagggttggttaaggctgatctagggtgtgatgatttaactaataatccaacattatgggctacaccatgactgacttttttaatgaatttgatgaaagcctggtaccattaaagccacaaacgcccacacaatacgtcaaattagatgatgccaacttaatccagcgtgatttggataccttttcagatacctttaaaaaccaagcactacaaaggtataagctaattagcactatagataaaaaactttcacgcggctggacccaacgaaatttagatcctattttagatgagctttttaaaggaggtgacgtagttcggccaaattggcgaactgttgctcgttggcgcaaaaaatatatcgaaagcaacggtgatatagcctcccttgctgataaaaaccacaaaatgggaaacagaactaaccgtataaaaggggatgataaattttttgataaagcattagaacgatttttagatgctaaaagacctactatagcaactgcatatcagtactataaagaccttattgttattgaaaatgagagtattgtcgaaggcaagattccaataatatcctacaatgcgtttaataaaagaatcaaagcaatacccccatacgcggtcgcggtcgcaaggcatggtaaatttaaagcagaccaatggtttgcttactgcgctgcgcacgtacccccgacaagaatattagagcgtgtagagattgatcatacaccacttgatttaatcctacttgatgatgagttacttattcccataggaagaccttacctaacattacttattgatgtatttagtggctgtgttcttggttttcatcttagttataaatccccttcctacgtatctgctgctaaggctattactcatgcgattaaaccaaagtctcttgatgctctgaatatagaactacaaaatgattggccttgctttggtaaatttgaaaatttagttgtagataatggtgctgagttttggtctaaaaacttagagcatgcttgtcagtcagcaggaataaatatccaatataaccctgtgcgcaagccttggctaaaaccctttatagagcgtttttttggggtgatgaatgaatatttcttacctgaattaccaggaaagacattttcaaatattttagaaaaagaagagtataaacctgagaaagatgcaattatgcgcttctcaacttttgttgaagaatttcaccgctggatcgcggatgtgtatcatcaagacagtaattcacgtgaaactcgaatcccaattaaacgttggcaacaagggtttgatgcatatcccccattgaccatgaatgaagaggaggaaacgcgtttttcaatgttaatgcgcatctcagactcaagaacgttaacgagaaatgggtttaaatatcaagagttaatgtatgactcaacagctttggctgattatcgtaaacattatccgcaaacaaaagaaactgtaaaaaaactgattaaagtagaccctgatgacatctcaaaaatttatgtttatttagaagagttagaaagttatctcgaagtaccgtgtacagatcctaccggctatacggatggtttaagtatctatgagcataaaacaataaaaaaaattaacagggaagtcatacgggaatctaaagatagtttgggcttagcgaaagcacgcatggctattcatgagcgagtaaagcaagagcaagaagttttcattgaatcaaaaactaaagctaagataacagctgttaaaaagcaagctcaaatagctgatgtaagtaatacaggaacgagcactattaaggtttctgaagaaagtgcagcccctgtgcaaaaacatataagtaacgataattctgacgactgggatgatgacttagaggcatttgaatgaatgccttaacagagatacagatagagaagcttcggaactttagcgattgcatcgttatgcacccgcaaattaaaacaatttttaatgactttgatgaattaagattaaaccgtaaatttcagtcagaccaacagtgtatgctattaattggtgatacaggtgttggaaaaagtcataccattaatcactacaaaaaaagagttctagctacacagaattatagtcgaaacactatgccagtcttagtaagtcgtatatctagggggaaaggcttagatgctactttagtccaaatgctggcagatctggagctatttggaagtagtcaaattaaaaagcgaggctacaaaacagaccttactaaaaagctcgtagagagcttaattaaagctcaagtagagctactcatcattaatgagtttcaggagttaatagagtttaaaagcgtacaagaacgacaacaaattgcaaatgggttaaagtttattagtgaagaggccaaagtgccaatagtactggttggtatgccttgggctgcaaaaatagctgaagaacctcaatgggcttctcgcttagttagaaaaagaaaacttgaatactttagcctaaaaaatgacagcaagtactttcgccaatatttgatggggttagctaagaaaatgccatttgatgtacctcctaagctcgaaagtaaaaataccacaatagcgttgtttgctgcatgtcgaggtgagaatcgagcccttaaacatctactgttggaggctttaaaattagcactaagttgtaatgagtatcttgaaaataaacattttattactgcttatgacaagtttgatttttttaatgataaggaaaaactaaaatcaaaaaatccttttaaacaagacattaaagatattgaaatttatgaggtaatcaaaaactcatcttataacccaaatgcattagacccagaagatatgctcacagatcgagtgtttgcaatagtaaagtaacctaggctgctgccaccgctgagcaataactagcataaccccttggggcctctaaacgggtcttgaggggttttttgctgaaacctcaggcatttgagaagcacacggtcacactgcttccggtagtcaataaaccggtaaaccagcaatagacataagcggctatttaacgaccctgccctgaaccgacgaccgggtcatcgtggccggatcttgcggcccctcggcttgaacgaattgttagacattatttgccgactaccttggtgatctcgcctttcacgtagtggacaaattcttccaactgatctgcgcgcgaggccaagcgatcttcttcttgtccaagataagcctgtctagcttcaagtatgacgggctgatactgggccggcaggcgctccattgcccagtcggcagcgacatccttcggcgcgattttgccggttactgcgctgtaccaaatgcgggacaacgtaagcactacatttcgctcatcgccagcccagtcgggcggcgagttccatagcgttaaggtttcatttagcgcctcaaatagatcctgttcaggaaccggatcaaagagttcctccgccgctggacctaccaaggcaacgctatgttctcttgcttttgtcagcaagatagccagatcaatgtcgatcgtggctggctcgaagatacctgcaagaatgtcattgcgctgccattctccaaattgcagttcgcgcttagctggataacgccacggaatgatgtcgtcgtgcacaacaatggtgacttctacagcgcggagaatctcgctctctccaggggaagccgaagtttccaaaaggtcgttgatcaaagctcgccgcgttgtttcatcaagccttacggtcaccgtaaccagcaaatcaatatcactgtgtggcttcaggccgccatccactgcggagccgtacaaatgtacggccagcaacgtcggttcgagatggcgctcgatgacgccaactacctctgatagttgagtcgatacttcggcgatcaccgcttccctcatactcttcctttttcaatattattgaagcatttatcagggttattgtctcatgagcggatacatatttgaatgtatttagaaaaataaacaaatagctagctcactcggtcgctacgctccgggcgtgagactgcggcgggcgctgcggacacatacaaagttacccacagattccgtggataagcaggggactaacatgtgaggcaaaacagcagggccgcgccggtggcgtttttccataggctccgccctcctgccagagttcacataaacagacgcttttccggtgcatctgtgggagccgtgaggctcaaccatgaatctgacagtacgggcgaaacccgacaggacttaaagatccccaccgtttccggcgggtcgctccctcttgcgctctcctgttccgaccctgccgtttaccggatacctgttccgcctttctcccttacgggaagtgtggcgctttctcatagctcacacactggtatctcggctcggtgtaggtcgttcgctccaagctgggctgtaagcaagaactccccgttcagcccgactgctgcgccttatccggtaactgttcacttgagtccaacccggaaaagcacggtaaaacgccactggcagcagccattggtaactgggagttcgcagaggatttgtttagctaaacacgcggttgctcttgaagtgtgcgccaaagtccggctacactggaaggacagatttggttgctgtgctctgcgaaagccagttaccacggttaagcagttccccaactgacttaaccttcgatcaaaccacctccccaggtggttttttcgtttacagggcaaaagattacgcgcagaaaaaaaggatctcaagaagatcctttgatcttttctactgaaccgctctagatttcagtgcaatttatctcttcaaatgtagcacctgaagtcagccccatacgatataagttgtaattctcatgttagtcatgccccgcgcccaccggaaggagctgactgggttgaaggctctcaagggcatcggtcgagatcccggtgcctaatgagtgagctaacttacattaattgcgttgcgctcactgcccgctttccagtcgggaaacctgtcgtgccagctgcattaatgaatcggccaacgcgcggggagaggcggtttgcgtattgggcgccagggtggtttttcttttcaccagtgagacgggcaacagctgattgcccttcaccgcctggccctgagagagttgcagcaagcggtccacgctggtttgccccagcaggcgaaaatcctgtttgatggtggttaacggcgggatataacatgagctgtcttcggtatcgtcgtatcccactaccgagatgtccgcaccaacgcgcagcccggactcggtaatggcgcgcattgcgcccagcgccatctgatcgttggcaaccagcatcgcagtgggaacgatgccctcattcagcatttgcatggtttgttgaaaaccggacatggcactccagtcgccttcccgttccgctatcggctgaatttgattgcgagtgagatatttatgccagccagccagacgcagacgcgccgagacagaacttaatgggcccgctaacagcgcgatttgctggtgacccaatgcgaccagatgctccacgcccagtcgcgtaccgtcttcatgggagaaaataatactgttgatgggtgtctggtcagagacatcaagaaataacgccggaacattagtgcaggcagcttccacagcaatggcatcctggtcatccagcggatagttaatgatcagcccactgacgcgttgcgcgagaagattgtgcaccgccgctttacaggcttcgacgccgcttcgttctaccatcgacaccaccacgctggcacccagttgatcggcgcgagatttaatcgccgcgacaatttgcgacggcgcgtgcagggccagactggaggtggcaacgccaatcagcaacgactgtttgcccgccagttgttgtgccacgcggttgggaatgtaattcagctccgccatcgccgcttccactttttcccgcgttttcgcaga

SEQ ID NO: 74 - DNA, 14397 bp, Artificial sequence
  Synthetic
aacgtggctggcctggttcaccacgcgggaaacggtctgataagagacaccggcatactctgcgacatcgtataacgttactggtttcacattcaccaccctgaattgactctcttccgggcgctatcatgccataccgcgaaaggttttgcgccattcgatggtgtccgggatctcgacgctctcccttatgcgactcctgcattaggaaattaatacgactcactataggggaattgtgagcggataacaattcccctgtagaaataattttgtttaactttaataaggagatataccatggcctcactgccgcatacgcagctgaaaatagtacagcgcggctgaaatcatcattaaagcgcctcactgccgcatacgcagctgaaaatgaattcggatccgagcgaaggagattaacttatgctgctactctcaagaccaacacccaacaaacttgaaagcctgagaggctatatcctccgtttatcgcaagcaaatagctaccatacaacccagtatgttttagagctggcagacctttggactggtagaaactatgatactgccagcaagtacgtttttggtgatagcaacttgagtaagttggcaaagatcaccaacacttccaagggagagttggaggctttacggtacgggcttgatgaccaaaaacagtcgagtattcatggccatctaattagtaatgagcatttgaggctggattacccacgagtctgtcctgagtgtcttgagtccaacaatatagctctcgctgtatgggatattccggcactgactgtttgccctgtgcatcacatgagtctttttgattattgtcctgaatgcaatacccgccttcgttggaatcgaccggctgtacatcagtgtcataagtgcaactgcgactttcgctcttatacgagtgataaattgtctgaaaaacaataccgcttatccagacttatccatcagctctgtatgatagataaaataaaccaccgaatgattccaaacgtattgaaaaatcatagcctggcggaggttctcagcctggtcagctctattgcattttttgattatcatctattgggtgatcagagcaaagatgggaaatttctttctttgaaaaccgctccaaactatcggctacatgaacattacactaatgctatgaagcatctggataactggccccataacttttatcagtttatggctgagagccggcagaatcgtaggagtcagggaatgaaagaaggtataagcaaagaagtgggggggatcttttattttcttcgcgccaataatgaaaaggccatatataggcctttatgggaggcctattgcaacttcagagaggtagctgcgcgaaaaaccctcgatgagctacgccttgctcgtattcatgcaaaaaatattcccgtcagcaccgcagctaaagagcttaagatacgtcctgagcagcttcgtaagttctgtgaaaggcttaatataccgttagaaaccgcctataaggatgtcaaactgatttcccgagagcaagtggctgatctaaaggattttatcagtaagttactgaccatcagacagtccgcagacattatgggtatctcggtgtatcaactccgagcgatggttcgtaaagatgttattactccattgcgtggtccaaccattgatcaatcaagagactggtactttgagccagaatctatagaagcctttcatcagcagatagccaagtattgtttatacaaaggtgcaaagcgtactcatgatatggatctaaaacaggctttagaacaactttcatactaccaaatggggttggctgagatcgttcaggccatttccgcaggtaaattacgacctgccagcgagagtaaagcgatcacgttaaatgcactccagttttcagctgaggaaatcaaagcacttcggccagagctgaaatcaaataatgactattggcagccaccggagatagaaaaataccttggctgtaaaaaagatcttgtttacgggttgttgaaaagtggccatttacctatggaaaaggtcagtctccccggtagaacccgccctgttgtcgcgtgtaaaaaatctgaggtgaaagcatttaatgaaaacttttacttgcttcgtactctcagccgaaaaacgggagttgtcagtgaaaaattaagaaaactgctggaagccaaaaaaatccaacccgtttctggtcctactgttgatggcggttactgtcacttttacaaaaagaataaaaacattgataaactcctgaaggagttgggtgctaagtgaggatccggaaaggagattaactaatgctattatcaagaccttatatacaggatgatgaatctattgaaagctatattatccgtctttcaggagccaacggttatacggttagacagtttgtaaatatttattttacaggctttcaatcttataaggattttgataaatatacaccacctcttaaacttgttaatctcaatcatggttgttttaagaataaagatcgtatatctttttttgagttaatcagttcttctacgaggcaggataaagcaagattattcaacaatttagtagaatctgtaccttctgaaaatcttgaattgtcaaaatatatttataaaggggtcgaggttcctgcttgcctattcaggagtgagtcagtacctatatgcccattatgtttagttgattctccttatattagacagtattggcatatagctttagttcaatgttgttcaaagcataaaatagatttattgaagtcttgccctcgttgtcagactactatttcatatttgaatcatgagttgatattgtgctgtccttgtggttatagttttatccaggagccatcttcctatcttaacaaaaatcatgatgaggtacttctatcgctggtagacctaatttatagcagcatgactgagaatagtattcgagcagaattaagttcattaccttcagataacatttatacaatttttggaatggccgttttttattttcaatatttgggtaaacttacacacttgtcaaaaaaattttatgcatttttagatttcattagaaggtggcctcgtagctatatagcgttgctatctgagaatgctgacaagggtctgcgttatcttattaaaccatctaatgaatcagagtttaagtccatttttggtagcttattaaataatattaagcgtctacctaataatttagataaggatgatttgattaagaaggagacatacgctttcttccgtcagaggttgttgttggataaaaaaaatgaaaataaaaactctgtctcaaatctgctgttgactaaagatgaagtggcattattgttaggtgtatcaacggatcgagtagccaagctgacttctaaaggaaagttgtgtgcaaaacgaaagaccttaaaggcttatgtgggcagttatccattgggcgaggtatttgatcttttgagcgaaacagattctgctatattttagtccggaaggagaatatgcatggcgttcatagaattagatattggatacaatatcgagtcgaggtcaactttggaattttctacctctatgctctctgttccttcagatattacaggaaaggtaaacagtttctttgcccaaattataaatcagtccaataaatctaagtcaagtctttcaggaacgccattacagacagctagatcattacttaaaagcaagctgttcattattgatgcttgtcaatccttaaaaggttttctgactcataatcctaaaatttatgatgctaaagtccgaggaagggttttttcattgtcagtaaactctggaactgattcctcttatatttatggtgactcagttagctaccatcatcaatacgattgggcaggtaacgccggatacatatcaaagcgatatttcctttgcactgagtttatatataaaggagataatacaacgctgtatcatgagttcctcaaagagtcatcggagcttgtggagatgcttacagggctagggctaacaagtaagcatcgagaacttatcaaaacctcttgcctagctcatcaagatagtgcttttccaaactctgtgcccccctatcaggttcaagtgcttattccatatactgatgtaaacaagaatacagaatatatttcggtttcgccaatatctgcctcaaaggttcaagcggctatacacaccttttgtcatagcgaaaatgctcacacagtgggtcggtcttttcattatccgaccaggccggaaaatattggtgctttagcgatctctacaggtggaagtattggagtgctggcaccggatataatcttggaatcagagattgtacccacttcttcagacatactgaaagagcttagagttaacgtcaacaaggatctttttgatacttctaatctggactttagttattttcttaaactacgaaagaaagctgactttgcgataggtcggtacatccccactccaaagtcgtcccaaaaagccgcgtttctcgacatcatcaagaacaatgtggagaaaatgttctctaaactagataaactccggcttgctgttcagcttggagttctgcatgaagataaggtcgatgggctaaacttagttcaaagaagttatgtaatcgagcagaaactttctgaggcgataatgaatcaggtatggactcaggctaataattctattcagaaatttatctcagggactcactacaaacaaattgcttatcaccctacgcttacccgttatattagcgaaagtgttcggcgtcatctacaacctgtattcagaggtaatattgagtcctcaaagccggaaattgtcactgatggtcatgaaggggagaaagaagatactaatgagccaattaaaacagctgccaatgccattgttttcatagtcatccccaggctgacggttatagatgctcatgcagatagttcggcatacacaacaggcctccccggaatcactgctcttgttggttatgttgataagctttgcagaaatattcaaattcaaactaaggtcgaaattgataacatcgaagtagcctggcttcttcgtgattttcagcgtattgagggtatgaaaaaacacgagccagctcgttgggacagtaaaaagaaaacaactttgagtgatgttgtcagtcgtaaattctgtaacctatcgtttgacttgattttaaaatgttctgcggactatgagcaactcaactgcttaaaggaggagttgccagattgcctgcccgctaaatttgcttcaggcatggtcagtactgcggaagagatttccacaaaaaattatatgtcagaatctttcttgatttttcagtcagagcaagatttgcttaatgaactccaatccgaagattctcttcgctgggctgtgcttgattactcagaaaagtttgtacgtaagtcagattctatactagaggatctggcagatgctttccttgagtacaaggaacagaaccctcgctggaaccaactcacggtttcaaatgttggtttcaaattattggaggagcctgtcacgcgaccgaatagcaggcttacacatcatgcgtatgcagaacctgtgatcggtgtacaagagttgtggttgataaaaaatctgtctccagaagtgtttggcacattaccgattttttgggcatatcgatcggcaggaaaaagaatcctgtgccaagcataatattgaggagatatcctatgatacttccaacgatccttacctatgaaaagtctctggcgccttctgttgccctgatgtttgcaaaaacgtacgacaataaaaaggttccgattgaggtttatgatgcaaaagggcggggagcgcaaacaacctttactgcctgtcatggaactaaagatacagacttaggtgagtggttgcctgtaaggcaagatatttgtcatttaccacatgatgccagtgagttaataattgagttcccccttaaatactctcctaattccatgaagccagggtcttgtaatgttgccgattggactaccctgctaaaggagatggctctcctctatggggaaaaagggggctatttatatcaggcatactgtcagatggatgctctttttcaagctgttcccttttggaggaataaagatgctgaaagcatgacattacgggttatgaatatcagtgatagcatcctgccaccttatgttttcacaaatcttccatgttctattgatgaactgattggtagtgacaagcagcagcttgattcacttatcaaaaatatcgaaagcgcattgacgggtaaacgaaattttttacgccttcgagttatcgcagaattaaagaaagatattcttgaagaagtgcacccaagccagcaatttattgaaaagttacctgaagctaaaaaagaatacctccatcgacagggaaggtatcagaagtccaggcaatatgtctcttacaacctgggtaattttcgtcaggccatgttacgcccaacaaaaataggagccggtttacggcctgatcgatggaatgatgtcgctaaagaggttccagtgagtgtttatgggctcgacccggaaagccatgcagcgataagagggcgtggcactaagaacgatttctatactctgatcagtaacatcaaaaagcatattgagacactcagagcttttgacggtgatatgtttaatgatgagtcgatactaactcttggcaatattcacttcattatggccaacttgattaaaggcggtgtgtataaccgagaaagctccaagacaaaaaataaaggtgagccagatgaatgcccaatcgatttaagtaatccgtgaggagaaattttatgaattatctgtcatttaaaattattcctgacgatgcagatccaaggtttttattaggctatatacttcaagaggctcatcctataattgctcgttatggcaataataaaattggtacgttgtttcctgaatggaatgtcgatgaacctggtcgttcaattgctttttgtggagcattggatgttctaaatagaatcatgaaacacgaatatttcagggttatgattgatgctggggtgttaaaatacaatttactagacattgatcctatcaatcatcagaaagtgatttttttaaagaatcagaaaatcaccagcaatacgcctaaacgccagcaaggaaagatcaaacggataataaaaaggcagatagagagaggtgaaattcaaagtgccagagagtatcgacccagaacagatcaacaacagactgacatgccagacgttttctaccatcttttttttcttgatagtaagagcactgagcagattatgccactctgcattcaaatgataccagtcgctgagagtgaaggaatagtcggtactcagacctttgatcactatggattcagcacacttgagcaacatcgtgcggtagtgcctctgatttcaccaatattttaaaaggaggtaccataatgacaccacttcttagtcagtatgtaggatcaaggaagctgactccgggaaggcatcgctataaatatccaagcaggaaaatggaagcacacgtaatcactgaatctccaaatgaatgtaatttttgcgagtttcttgagtttgacagccgtgttaagggatatatttctcaaccaaaaactattatatatgacttatatcaatgtggtcatgattatactgccgatttttttgttgacttatatttatcgaaacctgccttctatgaaataaaaccgaaggattatgaaaaaagtgaggaggaagaagataaattctatgaggttgagaaggtgttttatgatatgggctttaatttttatttggtaacaggtgattatattgagaaaggaaatcgtttaattaattttaagaaacttcgtaggtttgtcggtagcttaccagaaagaaaaatacgagagtttattgagaggttggtctttgaaagtaatgaaggcatatctttcggcgatctgattgctaaattaagaaatcagttggatgttgaggaaagggacgcttttcaaaatatctatcaatgtatagcaaataaaatcattgggtttgatattgatagatataaattaaatcagtctgtaatggtaggtgtctggaatgagagcttcgatagagcctggaatggagtaccgattcaggaatagggtttatagtattgtctccgtgggtgattccgagatgatcgtgatggatcggtatgatgaggaagaaattcatatatctaaagatgagttcaataagtgctggattaaaaatgaaataaaacttgtctcaggacgaatggctaattcagtaaaaaacaaattaaaaacgccagtatcaacgctcagtgaggagcaaaaaaaggtagcggtgcgaaaggaagagtatataaaaaaatttcttgacaagaaagatgcgctaagaaaatccgagactgatttagattattctaaaataattgttgaaattgcggctgaactgaaagatccatatcctccatcattaagaactctaatgagatggaaaagcgactacaatgcagcaaatggatctatacgatcattaattaatgggttttctaattctggcagaaagtcaaatttaaataaatgccaaaaagagctgattgaaaaggcaatagataatgtataccttcagccggaaaaaggaacagtggctcaaacgcatagtgaactcggagttcttgtggagatacataatcgggagaacaaagataatgaaagtatgataattaaatgtccaagccgatttcaagtacagaaagcaatagaaaatcttgattatttaaccaaactcgagaaaagagaaggaaagcgagaagcggctagagatgtgcgtacatctaagcataattatcgacccgaaaggatattggagataggtgaaactgatcatacattactcgactactatgtgatagatgatgatttactcatgcctcttgggcgaccgtggatgactaatataatggaattgtattctcgaatacctttaggctctgagataacctatgaaaatggtagctttattacaatcgctaatgccctaaaaatgtcaatactaccaaagagcaatttctacgaaatgtatcctgatattaaaaatacaaccaattattcaggcattcttgaaagtcttagaacggataatggagcagactttatatcgaatgacctagatgatgcagcactggaaatcggtatgattctacatcatgttcaggttacaaaatcttggcagaaaggagccatagaaggtttttttaggaagcagaacgtaatgctacttgataagattaaagggaaaaccttcagcaatatactagagcgtgcaaagtatgaccctaaaaagcaatcgttgataagactgtctgatttcaaaaatattttatacaagtggctatacgatgtttatccatataatgaagtaagagtagagcatggtaaaaaaataattccccataaactctgggaaaaaaacataaaggatcatcctcaagattttattgaaaaatctaacttggatattatttttggaaaaacaggcagtagaaaagcacgagacaaaggaatagagataaataacctgaagtatgatggtattgatttaactaaatttagagcatctcatggtaataatgaaaccgtcaaggttaagttcgatccatctgatctaggatttatacatttttttgataagtttgagaagcgctttattaggcttaatgctgtcgacagtgaatatgcaaataaacttactttatatcaacatggaattattaaaaagtatgtaaaagaggatatgagacgaagtgaggaggatataaaggttctgatggatgggaagattcaattaagagatatgatcaatgacttgttagaaaataagccgagtaaattagcttcaaaaagaggtgcgcagttgcgacagggaatgactaactctattgcggatgcaggtgaaaatcaaagagattcgataccaagattagaagaaaatcaaatcagttcggtgtcagatgttagtgttgaaagtactgcatgtgattcaattatctctgactccaagggtacagaagaaagtaaaaaaaacaccagttacgaaaagtggactgatgatgacatagagtggtagtaatatgatgaatatagaaaaagaaatttattataattgcttcatacccacttcaagaattgttgatgttattaatgatatgatcaaatgtaaaaaaagttttgatacaaagatggagccaatttcaatgatgattatggcgggaagtggatatggaaagacattattgattaactatttctcctcaaaatacccgccggttactgagaaaaatgataagggggaacaggataagaaagaagtcttagtcgtaacgttaagatcaaattcaactaaaaaagatgctgcaaccgaaatgttaaaggctcttggtgatccaaatccagataaaggaagtttattgcagcagacggaccgcattttgacattattgtgtctatgtggtgtaaaggttatcattattgatgagtttagccatattgttcagagcaacagtagtcgggttttaggtaaaacagcagattggattaaagatataattaagccacccaaagacaatccgaaggaatgcccaaaaataccgttaattgcagtcggaatgtacagtagcataaaaatccttcagtcaaatcctcagttggatacactcgttaccaaaaagtcatatctttttccttatggcatatctcaaaaagatgagctcgatttttacaagatttttttaagcaatgttggtaataaaataaagaatcttggcttggaaatagatctcgaagatccagagatctacttgagactttttgctgcatctaacggtattccgcgattactaatgaagataatctcatgtgcttgtggtatcggttgttcaaggggtgataataaaattgtggatgtctcctgttttgaaaatggctttgaggatgtctttggaaagcaaaagaaaaatccatttaaagccacgtcgctgaaagatattccctttactgagagtacaacttatacgacgtgggtggaatcaaaatgtagtcatgcggttcttgaaggaaaaaacaatggtttattagatgtggtttttaaaactggaaaatcaaaaggttttatttagcctaggctgctgccaccgctgagcaataactagcataaccccttggggcctctaaacgggtcttgaggggttttttgctgaaacctcaggcatttgagaagcacacggtcacactgcttccggtagtcaataaaccggtaaaccagcaatagacataagcggctatttaacgaccctgccctgaaccgacgaccgggtcatcgtggccggatcttgcggcccctcggcttgaacgaattgttagacattatttgccgactaccttggtgatctcgcctttcacgtagtggacaaattcttccaactgatctgcgcgcgaggccaagcgatcttcttcttgtccaagataagcctgtctagcttcaagtatgacgggctgatactgggccggcaggcgctccattgcccagtcggcagcgacatccttcggcgcgattttgccggttactgcgctgtaccaaatgcgggacaacgtaagcactacatttcgctcatcgccagcccagtcgggcggcgagttccatagcgttaaggtttcatttagcgcctcaaatagatcctgttcaggaaccggatcaaagagttcctccgccgctggacctaccaaggcaacgctatgttctcttgcttttgtcagcaagatagccagatcaatgtcgatcgtggctggctcgaagatacctgcaagaatgtcattgcgctgccattctccaaattgcagttcgcgcttagctggataacgccacggaatgatgtcgtcgtgcacaacaatggtgacttctacagcgcggagaatctcgctctctccaggggaagccgaagtttccaaaaggtcgttgatcaaagctcgccgcgttgtttcatcaagccttacggtcaccgtaaccagcaaatcaatatcactgtgtggcttcaggccgccatccactgcggagccgtacaaatgtacggccagcaacgtcggttcgagatggcgctcgatgacgccaactacctctgatagttgagtcgatacttcggcgatcaccgcttccctcatactcttcctttttcaatattattgaagcatttatcagggttattgtctcatgagcggatacatatttgaatgtatttagaaaaataaacaaatagctagctcactcggtcgctacgctccgggcgtgagactgcggcgggcgctgcggacacatacaaagttacccacagattccgtggataagcaggggactaacatgtgaggcaaaacagcagggccgcgccggtggcgtttttccataggctccgccctcctgccagagttcacataaacagacgcttttccggtgcatctgtgggagccgtgaggctcaaccatgaatctgacagtacgggcgaaacccgacaggacttaaagatccccaccgtttccggcgggtcgctccctcttgcgctctcctgttccgaccctgccgtttaccggatacctgttccgcctttctcccttacgggaagtgtggcgctttctcatagctcacacactggtatctcggctcggtgtaggtcgttcgctccaagctgggctgtaagcaagaactccccgttcagcccgactgctgcgccttatccggtaactgttcacttgagtccaacccggaaaagcacggtaaaacgccactggcagcagccattggtaactgggagttcgcagaggatttgtttagctaaacacgcggttgctcttgaagtgtgcgccaaagtccggctacactggaaggacagatttggttgctgtgctctgcgaaagccagttaccacggttaagcagttccccaactgacttaaccttcgatcaaaccacctccccaggtggttttttcgtttacagggcaaaagattacgcgcagaaaaaaaggatctcaagaagatcctttgatcttttctactgaaccgctctagatttcagtgcaatttatctcttcaaatgtagcacctgaagtcagccccatacgatataagttgtaattctcatgttagtcatgccccgcgcccaccggaaggagctgactgggttgaaggctctcaagggcatcggtcgagatcccggtgcctaatgagtgagctaacttacattaattgcgttgcgctcactgcccgctttccagtcgggaaacctgtcgtgccagctgcattaatgaatcggccaacgcgcggggagaggcggtttgcgtattgggcgccagggtggtttttcttttcaccagtgagacgggcaacagctgattgcccttcaccgcctggccctgagagagttgcagcaagcggtccacgctggtttgccccagcaggcgaaaatcctgtttgatggtggttaacggcgggatataacatgagctgtcttcggtatcgtcgtatcccactaccgagatgtccgcaccaacgcgcagcccggactcggtaatggcgcgcattgcgcccagcgccatctgatcgttggcaaccagcatcgcagtgggaacgatgccctcattcagcatttgcatggtttgttgaaaaccggacatggcactccagtcgccttcccgttccgctatcggctgaatttgattgcgagtgagatatttatgccagccagccagacgcagacgcgccgagacagaacttaatgggcccgctaacagcgcgatttgctggtgacccaatgcgaccagatgctccacgcccagtcgcgtaccgtcttcatgggagaaaataatactgttgatgggtgtctggtcagagacatcaagaaataacgccggaacattagtgcaggcagcttccacagcaatggcatcctggtcatccagcggatagttaatgatcagcccactgacgcgttgcgcgagaagattgtgcaccgccgctttacaggcttcgacgccgcttcgttctaccatcgacaccaccacgctggcacccagttgatcggcgcgagatttaatcgccgcgacaatttgcgacggcgcgtgcagggccagactggaggtggcaacgccaatcagcaacgactgtttgcccgccagttgttgtgccacgcggttgggaatgtaattcagctccgccatcgccgcttccactttttcccgcgttttcgcaga

SEQ ID NO: 75 - DNA, 13077 bp, Artificial sequence
  Synthetic
aacgtggctggcctggttcaccacgcgggaaacggtctgataagagacaccggcatactctgcgacatcgtataacgttactggtttcacattcaccaccctgaattgactctcttccgggcgctatcatgccataccgcgaaaggttttgcgccattcgatggtgtccgggatctcgacgctctcccttatgcgactcctgcattaggaaattaatacgactcactataggggaattgtgagcggataacaattcccctgtagaaataattttgtttaactttaataaggagatataccatgggtgaactgccgaataggtagctgataatagtacagcgcggctgaaatcatcattaaagcggtgaactgccgaataggtagctgataattagcgaattccgagcgaaggagatatacatatgatgcttttacaacgtccaaaatcttatccagacgaaagccttgaaagtttttttattcgtgtagcaaacaaaaatggttataatgatgttcattggtttttagtagccgttaagcgttatcttttagatatagatccaagaaagttccagacatttcccaccgatatctgttgcatcaacccttactcatccaagaaacattcaatctcgcgaacacacgcattacatcacctcagtcagttaacatttaacgaacctgtagatttactcggtatcgcgttaaacagaaaccaaatgcagttttctccgtcaacaaccgcgttaatccgtggtgcagaagtcattccacgctctcttctacgtaagggggcgattccatgttgtccctgttgtctaggtgaacacggatatgcgagttaccgctggcatttttcagggtatgaatattgtcatgaacatgacgttaagttaatagaacgctgtagttgcggggcaatttatgattaccgttatgcgggattatcaggtgtatgtactgaatgtggggaaaatatatccgcatctcaagaaaaccacgagcctaaagcgaccaggatagcatcttggttagcaggagatgatgtaaaaccattgccagatgtccctcttagttatagatgggggttcatgcattggtggtcccaaatatcaagctcatgtaaaactcgaaacaatggtgagttcttagccttttgggaacattggccaaactcctttcacaagttgattggaaaagaaatagatttcaatttcgaatactgcgttcttagtaaaaacgatttaagagtgaaagacattctagggaagattctgtttagctcaattcagcttcctgaccgtaactttcgttcgaacatcatattaaaagagatgtttcagtatatagaaacacacttatgggacgacaacggtaaactggcgaaccttcgaatgaatatgcttgagatatgtgtattgctgaactgttctcgggagcaagtgacatcaatgattgagcaaggcttactccccccaaatcgtcaacttggaaaacgagagatactcatcgttactgaatacgctttttacttgggtgatgtttattgtctttggctttcagaatttcaatctgatgagttcaatcgctctttttacctgtcgaggtggtgaatggcaacactggcagaaatattagataacaaaacagacgaccttaataaagacttaagaagagcctttagaccactctccgcacccgtagacatatcagatactcccattgaagcgctaaccatactagtgaacctaacagatagagtcatcgaacaaaaaaacctacttgatagacagaaatgtaaagacaaacttagagacgaaaaatggtgggccaactgcttcagaaccgttaaatatcgccaaagtcataacccaaagtttcctgacattagagcaaatggcgtaattcgtgccgcaccagtcgggcatttgccagcttgtatgctttcttctagtaaattacccaaaaatagctgggcttatgccaatgactctagccaaatgaataaatcctgttttttaacgagtgaatttatatggaatggtgacgttcattgcttaggtcagttgctcacagagcttgaacatccgctctggaatgttctaagaaaactcggatgttacgttaaaacagccaaatacatatcaaaggaactagcacttattcctccgttggaaattaatacttcgctagttagaaattatctggcacagatttctcttccgaacggcgaagactcatatatttctttatcacctgtggtttctcaatcaatgcaagaagattgctatcaagtattgagtgagcactatcgattttctgctattactcgatttagccgagcgacaaacatgggaactctggcaatgagttgcggagggaaattcaaaatgatccgctctttgcctccgatagaaaagtaccaacatcaccacttagactccgtaaattggcttacaaagcgctcagtcagagctatacgagactacacagagtcttccgtatgggtaatatcaccaaataaactggcacttagaaaaaaatcaatcattggagacattaaaatgatgctttcccaatggctgcgtaccactcccacgcacgaagaaaagttagatataaggaaattaacagaacgcttcaatgtcgatttagccaaaaccaagtttgcaaatcgctatgcttatgatcccctgctaactcagttgatctacaactgtataggttcaatcattcattcatcgcctcaatatgctccaaaatgtgagggaaatgacgacaaatacttgctgctaccaaatcttagaatctctggtgcatcagccatgaatacgtctgtgagtattggaataccttctatgatggcgttttatggattcgtacacgctttccagagaaatgtacaaacagctaatcctaactttaaaattgaaagtttcgccgtatgcattcacaacattcatgtggaaaaccgcggattaacaagagaatgggtcccaaacacaaaaggacaaattacagcacctgcaacacgagacgattggcagtgtgacgttgcagtaagcctgattcttcgttgcagtcattattctcagctaataccacgcgatttcatacgcttattaccgggaagaatagcaagagggaaagtgacagtttctatatccgatataaaacacttaggccgatgtttgagtttggctgatgcaatcaaagcgatacccgttgaaacaggtagatggcttagcctaaataacgaagtgaccttaaacagtattcaagatgtgattgacgagttaaaaaataacaaattacaaaccgtcaactgcattggctaccacaggttagaaaccccatgtgaaaaacgtggctcactacacgggtacaaacatgctttcgtcgaaaccatactcggtatcataaaatttctcacaataagtgaaaatacaaaccccagccaatacttttggcaatatcactattcgaagcaaggtccgattttacttcccaggagcgtatccgatgaaacttcctaatggcttgtcttatatgaaatctattgaggcttctgacgtcattttccttgttaattggccagatggaagaaagacaccgctcccatacactagccgtgttgcgttgggtatgaaagagggttccaagtctgcatacaaagatgatgggcaaattgacgcggacgtaaccgcatattctctagctcagggtaacccccacgaaatcgacttttgctgtgtaccttacggagcagagagtattgaatgcgaattttctgtttcatttgcttcgagtcttcgtaaaccatttaagtgttccgatccagaagtaaaacgaaccctagttcaattgattaagctatacgaggaaaaggtgggttgggaagaactcgccaataggttccttgagaatatttgtaatggtagatggctttggagaaataacgaatgtacatattctacatcaatcggtataaaaccttggccttgggaagacgaaaaagccattagcccattccatgacatccgaaaaaattatgctggcactaaccacttcagagatcataaagactgggataatctaatcaagttaatcactgacgctttttcccaaccgaatgggctctgtattttcgaagtcagcgctacatttcgtttaggaacaaacgctccaatttatcctagtcaagtattcaaagactctgtcaaaggtgaaaaaaaccgcatctatcaatccactgacgtagatggagagagtagtcctatactcggttgttataaaactggagcggcaatagccacgattgacgactggtatccggatgcggacaaaccaatacgtatcagccactatggtgcacatagagaagacgtttattgttatcgtcacccaaacaccgggaaagatttattcacacttttggaaaaagccgatcaatacctcgaacaacttcaggctacagatgtattgccagatgaaatgattaatgacctgcattttatcgttgcaaacttgataaaaggcgggttacttcaacagaaaggaacctaaactatggattggcactatagaaccatcacatttttacctgaatatcgaaacaatgaagcaatcgcagctaaatgtatcaaggagctccatcgttttaattacaagtacgaaacgagatccattggcgtctcgttcccactctggggccaagaaacggtgggacgtaaaatcacctttgttagtaccaataaaatggaattggattttctgatatcacgaaggtatttcgtacaaatgacaaaacttggttactttagcatttccacaacacaaactgtcccagacgattgttcttatgttctatttaaacgtgcacactctatagataaaggaacatctgcgggccgagcgagggagttaaaacgacttgagcgaagagctttagaacgcggcgaaatatttgaccctatagcttattccaaaaccactagtcatgcattccaaagctaccactcactggaagaagatagcagcagtggcaataagttccgactgaatatacaaatgaaggaaaggtcaggaactgtaggtactggaaaatttagcagctatgggctaggcaataccgataattcattgcaggttgttcctttgatttaacctttaataaggagatatagcatgaaaaaacgaatcattaaaaactccaaagttaagaacatttctcgttttgtaagcttgaagacagattcagttcaaacaactgaatctgatcttgagtttgatgcatgttttcattttgaatttgcctcacacgtaaaatcatttgaaacacagcctctgggttttgaatatcgattgaatgggcggttacgtcgttatactcctgatatgctctgttatttcaatgatggctatgcgacatattatgaagtgaagcctaagtgggtaactgaacgggatgaatttaagaaaaaatttgatgcacagaaacaacaagctattgctaacggatatgacttacttgttctgactgaagatgacattcaaacttatcctttgctggacaatctgaagatcattcatcgctacgcttgttctgatagtcttgataatgtgcaggttaggatcttaaagttatttcaaaactacggcgaaatgcgaatctcgcaagtaataaacgccagtcaggggcagtctgcatctatattgcctgcgctctatgatttgatcgccaaaaaaatcctagagtttgattggcactgtccaatcagtcatgattctcttgtctggagagtttcatgagtgatgactctgaaaatctttatgcttttggatcctttttcccagagaaacactcgaatacttcggtgcctaagacatcaaagggcacgcgattcgggattgaactgcaagaaagttatcaagatcttttttcattcgatgaaaaacgcagagatgaggctattcatcgatacaacatattagattatcttattgaactgcacggccctagtttaaccttaaagaaaatatcaggttcgatgaagggtcttgcagataaatttcaccccaatgtaccgtctgcaccatcaatatatcgttattggactacgtttaagaaatctgggtttgtactttcttcgttgattcctggggtaacgagaggtaatacaaagcaacgaaaaaccttggaactggaagagtatatagagagagctataaaatcatatttttcggcagagtcgccaacaattcaacaagcctttacgttattagaaacggaaatagatagacataatgagtgtaatgacacccaattatcttttgaatatgaatcctttagaaaaagaattgtaaaaaaaacagattatgaaagactgctaattaaaaaaggtaaaaaagccgccgatacatactacaagaaagtcggacaacgaccggaaacgactcgggttttgcagcgtgtcgaagcggatcatactcgcctagatttgtttgtgattgatgatgctcgtaaacttcctcttgggcgcccgtggcttacattactttttgatactcatactaaaagtgtcgttggtttctatcttgggttcgagccaccaggttatttatcggtttctctagccctagaaaatgcaattttacctaagtattacgttaaagagttatatccagaagtaaaaggggagtggccatgctatgggttaccagaacaccttattgttgataacggtgctgagtttaatagtaaagactttgtaaccgcttgtaaaaacttacgaattaaggttaaaaagaaccccgttaaaaaaccttggctgaaaggatctgttgaacggtattttcgaactatcaacaataaactgctttctggaatcccaggtaagagcttcagtaatatcttcgctcgcggcgattataatccacaaaaaaatgcgattattacccgttcagatttgatgaaagttatccatgtttggcttatcgatatataccaatctagccctaatggtttggaaaataatatacctaatctttcttgggctgatgctatgcgtagtgcttttccacctcgctcctttaatggttcaatagatgaactaaggtttaatcttgggaaacatgttgagatttctctcgatagaaacggtattcgccttaaaaaaacactgcgttatacaagttcatatcttgctcagtatttcggaaagcatacatacgatggtaagagcattaaggtaaaaataaaatataatcctatttgtatgggcaacatatacgttctggatgaagataaacacgaattttttgccgtagaatcagttgatcctgactacgcttattcagtatcagagtggcttcacaaagtgtgttgcgattatgcacgaaaccatataaggaataactatagacataatgatgttattaaagcctggagagtgatatacgatatcatcgatgaagcactgcacctatctggcaacggtaagcaggctaatgttgggattagacaagcctctaaacttgaaagggtgcgtgagcatgctgagcggaccaaatctcatcaaaaaccagagttgcacatgtcgagtaatgacgatattgattgggacgttgaagtgaatactgatggctggaaaattgattcggttcgaggtacaaataaatgaatcattttgcaagagcaccccaccaacaggtgaagagtatttttattagtaattctcagatagatgaaattctctcggacatagaggaatgtcgagaggagagtgatggtatatcggaaccagaatgtctaattgttgttggtgatagtgggtcaggcaaaaccactattatagataaatatttagtcgacaacccaaggatggaagctaatgatggttctatcattcccattttgttcacttcgttacccgcaaatgccaatccagttaccgcctcggaaaggctgttatcttcgatgggagatccgttagcatttagtcatggaaaagatcccgccgagttgatgaaaatagtcaatgatttgcttcgcgagtgcagagttgaactcattatcatagatgagttccagcacatgattgaccgcaaaagcaaggatgtacttcatagcacagctgactggttaaagatgataatcattgattcaaaaatacccgttgtactttttggaatgccttattcaaccgagattttgcgggtcaacaatcaattacgagggcgttttgaatctcaacaccatttaaagccattcagggtcaaagacacaagtgagctaatcagatacaaaacatttatgacgatgttagatgcagcgttaccctttttagaggaatctggattggcatctgaagacataatgaaaagggtgtatattttttccaagggaaacatgcggttaattcggcgtttgatcaataaagcagctaaatttgctttgctagaaaatgctccgtgtatttctttaaagcattttgcacgtgcggcacccaaagtgagtcgggatgcttgtaaatcatttaacccatttgatacagataccaaaaaactaaaaattattgaaccaccagaagatgttggttgggaaaattatcttgctgcaaaaggagattgacctaggctgctgccaccgctgagcaataactagcataaccccttggggcctctaaacgggtcttgaggggttttttgctgaaacctcaggcatttgagaagcacacggtcacactgcttccggtagtcaataaacgaggaagcggaagagcctcatctgtcattcctttgtgagtttgtaaatacaaccatacattgcaacaatacaactatatgttgaatcaaaacacctataccttgcattgtataaaaagtgtaccatactttcgaaagtttactacaagtgtggatactttgtatgaaaaaacgaatcattaaaaactccaaagttaagaacatttctcgttttgttagcttgaagacagattcagttcaaacaactgaatctgatcttgagtttgatgcatgttttcattttgaattcgccaagaggcagtccctcttagaggatccatggagaaaaaaatcactggatataccaccgttgatatatcccaatggcatcgtaaagaacattttgaggcatttcagtcagttgctcaatgtacctataaccagaccgttcagctggatattacggcctttttaaagaccgtaaagaaaaataagcacaagttttatccggcctttattcacattcttgcccgcctgatgaatgctcatccggagttccgtatggcaatgaaagacggtgagctggtgatatgggatagtgttcacccttgttacaccgttttccatgagcaaactgaaacgttttcatcgctctggagtgaataccacgacgatttccggcagtttctacacatatattcgcaagatgtggcgtgttacggtgaaaacctggcctatttccctaaagggtttattgagaatatgtttttcgtctcagccaatccctgggtgagtttcaccagttttgatttaaacgtggccaatatggacaacttcttcgcccccgttttcactatgggcaaatattatacgcaaggcgacaaggtgctgatgccgctggcgattcaggttcatcatgccgtttgtgatggcttccatgtcggcagaatgcttaatgaattacaacagtactgcgatgagtggcagggcggggcgtaatttttttaaggcagttattggtgccctggtaccctgcccaagtcttatgaatgcttctatgtgatcaccaagcgattcggtcgtaccttaattaccaagcgactttgtcgacttacacatgactaggtgaagtgatggaactatttttgtaagaaagtttcttactgcgctttgatacctcaaatatatcgtcacaaaaaaattatcttatggttgtattaagcaatatcaacatatggttgtatttttctaatactttgatattaaagtaattataaatgtcactttatggttgtatcaacagagttattgttctgacaatgtagcagacgtcaggtggcacttttcccggtaaaccagcaatagacataagcggctatttaacgaccctgccctgaaccgacgaccgggtcatcgtggccggatcttgcggcccctcggcttgaacgaattgttagacattatttgccgactaccttggtgatctcgcctttcacgtagtggacaaattcttccaactgatctgcgcgcgaggccaagcgatcttcttcttgtccaagataagcctgtctagcttcaagtatgacgggctgatactgggccggcaggcgctccattgcccagtcggcagcgacatccttcggcgcgattttgccggttactgcgctgtaccaaatgcgggacaacgtaagcactacatttcgctcatcgccagcccagtcgggcggcgagttccatagcgttaaggtttcatttagcgcctcaaatagatcctgttcaggaaccggatcaaagagttcctccgccgctggacctaccaaggcaacgctatgttctcttgcttttgtcagcaagatagccagatcaatgtcgatcgtggctggctcgaagatacctgcaagaatgtcattgcgctgccattctccaaattgcagttcgcgcttagctggataacgccacggaatgatgtcgtcgtgcacaacaatggtgacttctacagcgcggagaatctcgctctctccaggggaagccgaagtttccaaaaggtcgttgatcaaagctcgccgcgttgtttcatcaagccttacggtcaccgtaaccagcaaatcaatatcactgtgtggcttcaggccgccatccactgcggagccgtacaaatgtacggccagcaacgtcggttcgagatggcgctcgatgacgccaactacctctgatagttgagtcgatacttcggcgatcaccgcttccctcatactcttcctttttcaatattattgaagcatttatcagggttattgtctcatgagcggatacatatttgaatgtatttagaaaaataaacaaatagctagctcactcggtcgctacgctccgggcgtgagactgcggcgggcgctgcggacacatacaaagttacccacagattccgtggataagcaggggactaacatgtgaggcaaaacagcagggccgcgccggtggcgtttttccataggctccgccctcctgccagagttcacataaacagacgcttttccggtgcatctgtgggagccgtgaggctcaaccatgaatctgacagtacgggcgaaacccgacaggacttaaagatccccaccgtttccggcgggtcgctccctcttgcgctctcctgttccgaccctgccgtttaccggatacctgttccgcctttctcccttacgggaagtgtggcgctttctcatagctcacacactggtatctcggctcggtgtaggtcgttcgctccaagctgggctgtaagcaagaactccccgttcagcccgactgctgcgccttatccggtaactgttcacttgagtccaacccggaaaagcacggtaaaacgccactggcagcagccattggtaactgggagttcgcagaggatttgtttagctaaacacgcggttgctcttgaagtgtgcgccaaagtccggctacactggaaggacagatttggttgctgtgctctgcgaaagccagttaccacggttaagcagttccccaactgacttaaccttcgatcaaaccacctccccaggtggttttttcgtttacagggcaaaagattacgcgcagaaaaaaaggatctcaagaagatcctttgatcttttctactgaaccgctctagatttcagtgcaatttatctcttcaaatgtagcacctgaagtcagccccatacgatataagttgtaattctcatgttagtcatgccccgcgcccaccggaaggagctgactgggttgaaggctctcaagggcatcggtcgagatcccggtgcctaatgagtgagctaacttacattaattgcgttgcgctcactgcccgctttccagtcgggaaacctgtcgtgccagctgcattaatgaatcggccaacgcgcggggagaggcggtttgcgtattgggcgccagggtggtttttcttttcaccagtgagacgggcaacagctgattgcccttcaccgcctggccctgagagagttgcagcaagcggtccacgctggtttgccccagcaggcgaaaatcctgtttgatggtggttaacggcgggatataacatgagctgtcttcggtatcgtcgtatcccactaccgagatgtccgcaccaacgcgcagcccggactcggtaatggcgcgcattgcgcccagcgccatctgatcgttggcaaccagcatcgcagtgggaacgatgccctcattcagcatttgcatggtttgttgaaaaccggacatggcactccagtcgccttcccgttccgctatcggctgaatttgattgcgagtgagatatttatgccagccagccagacgcagacgcgccgagacagaacttaatgggcccgctaacagcgcgatttgctggtgacccaatgcgaccagatgctccacgcccagtcgcgtaccgtcttcatgggagaaaataatactgttgatgggtgtctggtcagagacatcaagaaataacgccggaacattagtgcaggcagcttccacagcaatggcatcctggtcatccagcggatagttaatgatcagcccactgacgcgttgcgcgagaagattgtgcaccgccgctttacaggcttcgacgccgcttcgttctaccatcgacaccaccacgctggcacccagttgatcggcgcgagatttaatcgccgcgacaatttgcgacggcgcgtgcagggccagactggaggtggcaacgccaatcagcaacgactgtttgcccgccagttgttgtgccacgcggttgggaatgtaattcagctccgccatcgccgcttccactttttcccgcgttttcgcaga

SEQ ID NO: 76 - DNA, 13328 bp, Artificial sequence
  Synthetic
aacgtggctggcctggttcaccacgcgggaaacggtctgataagagacaccggcatactctgcgacatcgtataacgttactggtttcacattcaccaccctgaattgactctcttccgggcgctatcatgccataccgcgaaaggttttgcgccattcgatggtgtccgggatctcgacgctctcccttatgcgactcctgcattaggaaattaatacgactcactataggggaattgtgagcggataacaattcccctgtagaaataattttgtttaactttaataaggagatataccatgggtaacctgccggataggcagccaagaatagtacagcgcggctgaaatcatcattaaagcggtaacctgccggataggcagccaagaattagcgaattccgagcgaaggagatatacatatgcttaatccaatagagctttatgaagatgaatcgctagagagctgtttattaagaatcagtcagaataattactatgattcttttcaggattttagcgatgaagtttggttccaagtcaaagaagaagatcgtgaggttcgtggaactttccctgcaaccctaaatacgataaatctctatcactctcacacatcaagtaacttaaagctcaaagtactaatcaaaattgagcagtggcttgagattaataacttccctttattaaaaagcgccttgagcagatcaagcaatactttcttacgccaacattctgctgtttttagaaatggtgttgatataccaagaatcctgctcagaaaaaatggtattccagtatgccctgagtgcctaaaagagaacgaatacatacgtcaagaatggcacttcatcactcatgatgtatgcaccaaacataaaacagatctattacattactgcccagagtgtaaaacctctattaattatcaagaaagtgaaaacattacggattgtcagtgtggattcaaattcagtgatcacttagctccgcaagcaaatagtaatgctttactcattgcacaatggcttaacagcgaaaacactaagctggctaatgtttggggagagcaccaagcaatatcatctcgctttggtgtcttactttggtatatcaatagatataatctaacggatgatttttctacttcatttgtaaaatattcattaaattggcctactaatttctattccgaactcgatgagcaaatagataaagctaaaacagttcagattaaaccttttaataagatattttttaatgaaattttcaatagtcttttattagattgccgacacttgcctactcgcgaatttaaaactaattccatattgagtcatatatatcagtactttctatctcgctatcaaattcaacctaactctgatgttttctcaatcttgctaagccccttagaggcatcgagcttgctttcttgcactaccgatcaaatctatcgtttatatgaattaggttttcttaagttaggcgttaggccaaaactgcatcaaaaaatagcaagtcaccaatcagtttttacactctcaagtattattctagtcaaactttcaaacatgcaatccagtcaagatgaattgcatcactacctttcagcgtggtaactaatggaatttacagatattctcatcattcaagatgtaaaggaacgcaacagagctttcaaggttgcatttgctcactactcttcagctatttgtattgatgatcatgaaatcgaagcgattacatgcctacttaatttgtgtacgccaaaaacggaggattacctagacaaaactagcgcatctctgtttttaaataatcatgataatattcaaaagtgtcttgacgaactcaagtggttccatagtcacaatgttaagtatccagattgccgagttaaagggcgaaacattatttctctaccaatcgattcagtaaataacacaataaacagtaatgtagtcccttatcgattaggttggtcccatgacagtggaaaggtcaactatactcattttctactctcttgctttaaatggagaggaaaacaaacaactcttagtcaattattcgtaaccgacacgctgttttggttagacatcataaaaaaaatacaatgtaactggaccaagaaacaagctgagcaatttattcattccatacaaaaagaaatacctgcaaaaacacttccagagaacatcagtccatattcaaaacagatcttatttccatataaaaatgactatctaactttaactccagtaacttctaattcagttcaaacatggttagaacaccaatctaggaaacctaatgatattcgctggattaaacgagaaagtaagcaccctgctagtgtaggcgctttatcatcttctatcggtggataccatagcttaatattttcgccaccaagcacatcacaatcaccacactcgtatcacgataatatgactagcaaaactgaatgtagagaagccttttgtgcttcagctatcactgagaaaagtacgactgacgcattacaaaggctcatcagttctgaagtaagaatgaatgtgaaacatagaaaacaaatcagaaaatcaggagttcatttcattagacaaaaaatagctctttggcttactcctctgattcgatggcgagatcatatagataataaccagatacaaatcactaatgaccatccatcattagttaacctattcttgtcgtctcctattgctaattttcccgacttattaacgccattgcataatcacctaaatcaaactctaggaaagaataaatacacaaaacgctttgcttatcaccctgatttaatgcctattttcaaatcacaactttcatgggttctgaataaactggcacaagataaaaatataaatcagcagccagcccttccaaggacccaatttatccatcttaaaaatttaaggctatacaatggcaatgcgttaagctccccctatgtttgtggactaccttcactaactggtttttggggatttatgcatgactttgaacgaagattaaaaacaaagattgaagagaacattcattttgaagccttcagcctatttgttcatcaatatgaattacaatcatctcctccgctctgtgaagcatcggatgtttataaaaaaagagaactatcacctgcaaaacgtttattaacgcaaccttcttattcttgtgatatgcgttttgacctcattatcaaagttcacactgaggttaatttaagcgatattagtcaacgtatgctatcagcaatgcctgctcgttgtgttggtggcacgttacatcaaccttcgttacatgaaagtttagaatggcttacaagctatgtatcttctgaacacttatttgaagagttagctcgccttcctaactcaggtcgctggatatacccaccatcggaaacatttaacactccagatgaatttctttctatattggaaaatagcacacaccttgctatttgtaatggttattcatttcttgaggacccaacaaatagagagaatgtgagccttaatcaacacgtattttgtgaacctttaattggattagcagagcaagtaatacctatagatatgagacttaaccgacaaaaacattatttttcaaatgctttttggtcgatcaatagtgatttcaattctattcttattcaaaagcatgagtaaggatacgctatgaagctttgtaataatctaaactacactcgatcattgtcaccgggaaaggctgttttttattatgaaagtaaagatggtcagatgaatcctattaagtgtgagcaaactcatttaagagcgcctaaagctggattttcagaagcctttaatagcgattactcaactaaaaacactgccccacaagatctctcctttagtaaccctcaatttattgaagagtgttatgttcctgttggtatagatgaaatcaaaatccgattttcattacgtatagaagcaaattcattacaaccagataaatgctctgatattcaaattagagagatattgcaagcctttgccaccaaatataaagaaaatggcggctatcaagaacttggtgaacgatacgcaaaaaacttactttctggtacttggctatggcgaaatgagcataatctaggtacaagtattttaataaaaacaacaagtaaccaagaatttaatatcgatgatgcctttaagctatcaagaaaagcctcagctaaagataaaaaaacaatatcaaagttaggaagtgaaatcgccattgcactatctgaacctgatcattattactttgccgatattacggcaacgatcaatgtagccttttgccaagaaatttatcctagccaagagtttttagatactaaagaaaaaggtaaaccaagcaaagtgtatgcaaaaacgtcacttctaactggtgagaaaaccgttgctttacatgcacaaaagattggagctgcaattcaacttatcgacgattggtgggctgatgatgccgatattcccttgagagtaaatgagtttggtgctgatcatcacaatatcatagccagaaggcatccctcacatcgcaatgacttttacaccttaattcaaaacgctgataactactgcgcgcaactggatgaaaattcagatattactgatgatatgcattacgttatggctgtattagtaaaaggaggactgtttcaaaagagtgcttcttcaaaaaaaggaaagtagatgctcactcattattttagtattacgtatgtgcctgatgattgtgataatgagttattggcaggacgttgcatcgctgaatttcacaagtttatctctagtctaaggctgatagaaaacaactcttttgccattggcttcccaaattggtccgaacaaagtgttgggaatgaatttgctattttttctaataactctgaattattaagtgccattaagtaccagccctatttcaatttaatgaagaatgaggaattattttctattacagacatcaagcctgtgccaaataatcttcctcaaataagattcatcagaaaccaatctattgggaaaatatttataggttcaaaaaaacgtagaatccagcgttcaatcacaagaaataataaagagcatacacctatatcaaatgaggacagagagtttgatacctttcacaaagtgtcgtgctctagtaaaagtaaacagcaacaatttattcttcatattcaaaaaggcatcatcccgaggactacagactctagcaatagctacaatagttatggcttagcgacaaataataaacatttaggcactgttcctgatttatcaaaaatacctttttattacgaggacaaattatcaaataaagatcagtaacctttaataaggagatatagcatgtacgttcgtacactaaaacaatctcaagtaaaaaacattagcaaatttatgagcctgaagaatgattcgatcattcgtacagaatctatgctcgagtttgatatgtgctttcatcttgaatattctcctgatgttgttagctttgaatctcaacctcaaggctttcattacgaatatcaaggaaaacgcctcccctatactccagattttctcattacacattcatctggacaacaacaactacttgaagtcaaacctctttctaaaacccaacgtcccgattttcaatcaaaattcatccaaaaacaacaagcagcccagaagttaaatctttcattaatccttattaccgaaaagcaaattagaacaggtcatttactcaataattttaaacttctacatagatactctggactacatagtatttctgttactcaaaaagcaattattcacctcattcagaaagtaaataaaattcaaattaatcaaattgcaaacagcttaaacattagtaacggagaagcattaacaggtgttttaagttggctgtcaaaaggggcacttcaaactgattactcaaatggagtgattaatggcaactcgtatgtgtggttataactatgagttttccatttaacgatgaatttcaagagattatcgaggtttctggcgagcaaaataaaatcattcataatgaagaaacaaactcccttctattatcccttgattcatatagtcataacataaaaatggaagtactacgccgtatttcctttattaagtggatcaagccacgtttaaaaggtggctggacacaaaaaaacttaaatcctcttcttgatgatgcagctacacaattaaaaatgatagcccctaactggcgaactcttgctgagtggcataaaaattaccattcaagcgggaatgacatctcctctttaatcccaaagcactcaagtaaaggtaatattcaacagcatactgatagcgattttttgataatgaaagcaattaacgaaaaatacttaacactaacccgatgctctatcagtcaaacttttaagtactattgtgatttagtaataatagaaaaccgttccttgcctgaaaagaaaatcaaatctgtcagtcaacgtactttttacaaccgaatcaatgcactacctaaatatgatgtgactttaaaacagtatggtaaacgatatgctgatattaattaccgaaccgtagatagaatggtaaatgtaacaagacctttagagcgagtagaaatagatcacacacctcttgatttaatcttactggatgacaacttagagataccattaggtcgtccatacctaacaattttaatcgacagttatagcaaatgcattgtcggctataaccttagtttcaggcctcctagctttgaatctattcgtcacgctttttgcaatgcctgccttgataaatcatctattacacaacaataccctcaccttcaacaggattggcctatttccggaaaaattgaaaatcttgttgtagataatggtgctgagttctggagtaacagtttagaagatagcctacgccccttcgctaccaacattttatttaataaagttggtaagccgtggatgaaacctcttgttgaaaaattttttgatgtattaaataaaggcttggtgcattcacttcccggaacaactcgctcaagaatagaacaactaaagggatataaccctaaaaaagatgccgcgattacattcagtctatttttagaactatttcatacgtggattatcgacatctatcacatgagttccgatacaagagagactgctgttccttactttaaatggcaagaaggagtaacagccttaccccctctcacctatacagatgaagaagcccaacaattacgaattgaacttgggatattaaatactcgaactgtacgtattgggggtattttcctttatggattacgttatgaatcagaggagctaaatgaatacagaaaaatttggggtgcgattgataagaataacctaacgctgaaaacaaaaaccgatccttctgatatatcaaatatttttgtctatttaactaatgaatctcgctatattaaagttccttgcataacagatattagctatacatcaggccttacgttatttcagcatcaaacagctcaaaaattacaaagaactaaaacaagattacaaatagaacatgaaaaactcgctgattcacgtatatatgttgaaaatagaattgcggaagaagtagaaaaaatcaaatctagtaaaaaacgtactacgaaaactactcatgcatcaaagatagctcggcaccaagatattggtagtcatactcaaaaatcgattcaaatacctaatgagcaaagcgataccaaaaatgaacatgatgttttgaatgggtgggatgaacaatttgatgatttagagggattttgatgcacactttatcttcaactcaaaaagagcaactcatcagctttaatcaatgctttattgagtatccaataattactcatatctactctatttttgatgatttacgaatgaatcaaggtttaggtgcagaaccgcaatgtatgctcttacttggtgatactggctcaggaaaatcagcactcattaataactacctgttacaacaaccgccatcaaatttttccgcactcagttcattacccgttttacatacacgtatcccacgtagagtgaataacgaacaaaccatgtatcagttgttaactgacttaggacaatcaccttcaggttcgagacgtgcaaagcgatctgagatcgctctcgctgaaggagtagttcgagctttacagcgtaaaaaaacagaactcattattattaatgaatttcaagaactcatcgaattttcaagtgctaaagaacgtcagaatgtcgctaacacgcttaaatacattagtgaagaagctagagtatccattgtgttagttggtatgccctatgcagatattatttctgaagaacctcaatggggatctcgcttagcatggaaaacacaaatagaatatttttcattaaaaaatgacatgaaaacctatgttcaattcctaaaaggcctagcaaatcgaatgggatatgatgaggtgccatcactacacaataaggagtttgctattccactgttttcaatttgtaggggtgagctaaggcaactcaagaacttctgctctgatgcgatgctagaaagttttaagcaaaacaaaaacacattaactcatgatgttttaagtgccactttcaaatacaaatacccaacgaagaaaaatccatttgaaatgaatgtagctgacattccaattcaagaggtagagtcttattcaaagtataatctaaacgcaatgactgatgatgaacgccttactgcaactaagtttctcgatgctatgtctttatcttcactattgagtaagagttaacctaggctgctgccaccgctgagcaataactagcataaccccttggggcctctaaacgggtcttgaggggttttttgctgaaacctcaggcatttgagaagcacacggtcacactgcttccggtagtcaataaacgaggaagcggaagagcgatgtggctggggcttccacctatttgatgcttgcaaaattactctgcataaattgcaaagaagtctacaaatttgcaaaataagcctgcataaactacctttagttgtaagtttacaacatagaggtgaatatcatgtacgttcgtacactaaaacaatctcaagtaaaaaacattagcaaatttatgagcctgaagaatgattcgatcattcgtacagaatctatgcttgaatttgatatgtgctttcatcttgaatattctcctgatgttgtcctcccaacatcgttaaaagggatccatggagaaaaaaatcactggatataccaccgttgatatatcccaatggcatcgtaaagaacattttgaggcatttcagtcagttgctcaatgtacctataaccagaccgttcagctggatattacggcctttttaaagaccgtaaagaaaaataagcacaagttttatccggcctttattcacattcttgcccgcctgatgaatgctcatccggagttccgtatggcaatgaaagacggtgagctggtgatatgggatagtgttcacccttgttacaccgttttccatgagcaaactgaaacgttttcatcgctctggagtgaataccacgacgatttccggcagtttctacacatatattcgcaagatgtggcgtgttacggtgaaaacctggcctatttccctaaagggtttattgagaatatgtttttcgtctcagccaatccctgggtgagtttcaccagttttgatttaaacgtggccaatatggacaacttcttcgcccccgttttcactatgggcaaatattatacgcaaggcgacaaggtgctgatgccgctggcgattcaggttcatcatgccgtttgtgatggcttccatgtcggcagaatgcttaatgaattacaacagtactgcgatgagtggcagggcggggcgtaatttttttaaggcagttattggtgccctggtacctaccaaaacccttcgacatcctaaatttagtagttatcaaatatacataactgccgtattagaaccagaagtagcacgttcatgtctaaatattaattaaatttgttaacaataagtgaaatttaattacatactaaaattacagtcatattttaaggtaaaacattttgcagactatcactgcaaagctatgtaatcttatgctgcaaactcaaaattaagctcttgatttttagatgagggctatgcagacttatgttgcaagcatcactatttaaaacgccgcttttattaggacgtcaggtggcacttttcccggtaaaccagcaatagacataagcggctatttaacgaccctgccctgaaccgacgaccgggtcatcgtggccggatcttgcggcccctcggcttgaacgaattgttagacattatttgccgactaccttggtgatctcgcctttcacgtagtggacaaattcttccaactgatctgcgcgcgaggccaagcgatcttcttcttgtccaagataagcctgtctagcttcaagtatgacgggctgatactgggccggcaggcgctccattgcccagtcggcagcgacatccttcggcgcgattttgccggttactgcgctgtaccaaatgcgggacaacgtaagcactacatttcgctcatcgccagcccagtcgggcggcgagttccatagcgttaaggtttcatttagcgcctcaaatagatcctgttcaggaaccggatcaaagagttcctccgccgctggacctaccaaggcaacgctatgttctcttgcttttgtcagcaagatagccagatcaatgtcgatcgtggctggctcgaagatacctgcaagaatgtcattgcgctgccattctccaaattgcagttcgcgcttagctggataacgccacggaatgatgtcgtcgtgcacaacaatggtgacttctacagcgcggagaatctcgctctctccaggggaagccgaagtttccaaaaggtcgttgatcaaagctcgccgcgttgtttcatcaagccttacggtcaccgtaaccagcaaatcaatatcactgtgtggcttcaggccgccatccactgcggagccgtacaaatgtacggccagcaacgtcggttcgagatggcgctcgatgacgccaactacctctgatagttgagtcgatacttcggcgatcaccgcttccctcatactcttcctttttcaatattattgaagcatttatcagggttattgtctcatgagcggatacatatttgaatgtatttagaaaaataaacaaatagctagctcactcggtcgctacgctccgggcgtgagactgcggcgggcgctgcggacacatacaaagttacccacagattccgtggataagcaggggactaacatgtgaggcaaaacagcagggccgcgccggtggcgtttttccataggctccgccctcctgccagagttcacataaacagacgcttttccggtgcatctgtgggagccgtgaggctcaaccatgaatctgacagtacgggcgaaacccgacaggacttaaagatccccaccgtttccggcgggtcgctccctcttgcgctctcctgttccgaccctgccgtttaccggatacctgttccgcctttctcccttacgggaagtgtggcgctttctcatagctcacacactggtatctcggctcggtgtaggtcgttcgctccaagctgggctgtaagcaagaactccccgttcagcccgactgctgcgccttatccggtaactgttcacttgagtccaacccggaaaagcacggtaaaacgccactggcagcagccattggtaactgggagttcgcagaggatttgtttagctaaacacgcggttgctcttgaagtgtgcgccaaagtccggctacactggaaggacagatttggttgctgtgctctgcgaaagccagttaccacggttaagcagttccccaactgacttaaccttcgatcaaaccacctccccaggtggttttttcgtttacagggcaaaagattacgcgcagaaaaaaaggatctcaagaagatcctttgatcttttctactgaaccgctctagatttcagtgcaatttatctcttcaaatgtagcacctgaagtcagccccatacgatataagttgtaattctcatgttagtcatgccccgcgcccaccggaaggagctgactgggttgaaggctctcaagggcatcggtcgagatcccggtgcctaatgagtgagctaacttacattaattgcgttgcgctcactgcccgctttccagtcgggaaacctgtcgtgccagctgcattaatgaatcggccaacgcgcggggagaggcggtttgcgtattgggcgccagggtggtttttcttttcaccagtgagacgggcaacagctgattgcccttcaccgcctggccctgagagagttgcagcaagcggtccacgctggtttgccccagcaggcgaaaatcctgtttgatggtggttaacggcgggatataacatgagctgtcttcggtatcgtcgtatcccactaccgagatgtccgcaccaacgcgcagcccggactcggtaatggcgcgcattgcgcccagcgccatctgatcgttggcaaccagcatcgcagtgggaacgatgccctcattcagcatttgcatggtttgttgaaaaccggacatggcactccagtcgccttcccgttccgctatcggctgaatttgattgcgagtgagatatttatgccagccagccagacgcagacgcgccgagacagaacttaatgggcccgctaacagcgcgatttgctggtgacccaatgcgaccagatgctccacgcccagtcgcgtaccgtcttcatgggagaaaataatactgttgatgggtgtctggtcagagacatcaagaaataacgccggaacattagtgcaggcagcttccacagcaatggcatcctggtcatccagcggatagttaatgatcagcccactgacgcgttgcgcgagaagattgtgcaccgccgctttacaggcttcgacgccgcttcgttctaccatcgacaccaccacgctggcacccagttgatcggcgcgagatttaatcgccgcgacaatttgcgacggcgcgtgcagggccagactggaggtggcaacgccaatcagcaacgactgtttgcccgccagttgttgtgccacgcggttgggaatgtaattcagctccgccatcgccgcttccactttttcccgcgttttcgcaga

SEQ ID NO: 77 - DNA, 13357 bp, Artificial sequence
  Synthetic
aacgtggctggcctggttcaccacgcgggaaacggtctgataagagacaccggcatactctgcgacatcgtataacgttactggtttcacattcaccaccctgaattgactctcttccgggcgctatcatgccataccgcgaaaggttttgcgccattcgatggtgtccgggatctcgacgctctcccttatgcgactcctgcattaggaaattaatacgactcactataggggaattgtgagcggataacaattcccctgtagaaataattttgtttaactttaataaggagatataccatgggtgacctgccgtataggcagctgaaaatagtacagcgcggctgaaatcatcattaaagcggtgacctgccgtataggcagctgaaaattagcgaattccgagcgaaggagatatacatatggcttttctattttctcccaaggctcgggcattttctgacgaatcgctggaaagttacttgttacgggtcgtttcagagaatttttttgactcgtatgaagggctcagcttagctattcgcgaagagctgcatgagcttgattttgaggcgcatggtgcattcccagtagatttaaagaggctcaatgtttaccacgccaaacataatagccattttaggatgcgggctttaggactactcgaaacactactagatttacctcgatacgagctacaaaagttggctttgctaaagtcagatattaaatttaactcctccgtcgctttatataacaatggcgtagacattcccctgaggtttattcgtcaccacgccgaggaagctgttgattcgattccggtatgctcacaatgtcttgcagaagaagcctatataaaacaaagttggcatataaagtgggtaaatgcatgcactaaacatcagtgtgctttgctacataactgcccagaatgctacgctccaattaactatatcgagaatgagtcaattactcattgttcatgcggttttgagctgtcttgcgctagtacctcgcctgtaaatacgttaagtattgaacatttaaataaattactggataaaggtgagcgcaacgatagtaacccgctatttaacaatatgactcttacagaacgttttgctgcgcttctttggtatcaggagcggtattctcaaacagataacttttgtttaaatgatgctgtgaactattttagtaaatggccagcagtttttaatacagagcttgatgaactaagtaaaaatgcagaaatgaagttaatagatctgtttaataaaactgagtttaagtttatttttggggatgctattttagcttgccccagtactcaaaagcagagtgaatctcactttatttatagggctctattagattatttagttactttagttgagagtaaccctaaaactaaaaagcccaacgcagccgacttattagtaagtgtattggaggctgcaactttattaggtacttcagtagagcaggtttataggttgtaccaaaatggtattttgcaaacggcatttcgtcataaaatgaaccagcggatcaacccttataagggcgcgttttttttaagacatgttatagagtacaaaaccagttttggaaatgacaaagctagaatgtatttgtcggcatggtgagtatatgcatcttaaggaactgctagagattacagacaccactgagcgggataggtcattacgtcgtgcttttagcccttatacggcaatgattgatataacaggcagcgaagccgttgccctgattattttgttaaacctgacttatcgaaaaaaccaagttgatgacttgctggataaaaagctcgcaaaacaggctttaaaaagtgaagaccatattaataaatgtattaaggaaatagcgtggtttcatactcataatttaaagtaccctgacattagagtcagtaagcaaaatttagccgtagagcctccaacactgcactcttatgttttgagtagtgctaactatcctaaagcctatggctggtcacataactcagctaaagttaattttgctaaattatttgttagttactttaaatggcaaaatcaagtcagttggctggcacaagtattagctacgaactcggataactggaaatccgcatttacctctcttgggttatccgttaaggcatttaaaagtttatgtgtaaccgttaaaaattcattgcctgaagaggccattcccgactctgttgaccgctactctcgccaaattagaatgccttatcatgatggttacttagctgttacgcctgtaattagccatgttgttcaatcaaaaattcaacaggcggcaattgataaacgagcccgatttagcaatgtagagtttacgcgtcctgctgctgtcagtatgttagctgcttccttaggtggtgttattaatgtgcttaattaccctccttatatacgaagtaaatatcatggtttaagtaactcacgagcatttaaattaaataatgggcaaacagtatttaacgttgaggcactattaaagccggaattaattaaagccttagaaggtattatatttagtaataatgcgctggctcttaaacagcgtagacaacaaaaagtaaaaaatattaaagagctgagaaacacgcttttagaatggttttcacctgtatttgaatggcgcttggacgctattgagaatgggtatgacttagaacagcttgagagtgcttcagagcgactagagtataaaatactatcgctacccgacaatgaactcccttcgctaacgattcctttatttaggttactaaatgaaatgcttggcggtgtgagcatgacacaaaggtatgcttttcatcctaaattaatgagccctttaaaagcagctttacaatggttgcttgttaatcttacagatcaaaaacatgtactgattgaagaagatgatgaacattatcgctatcttcatttaagcggtatacgtgtgtttgatgcgcaagcattatcaaacccttactgctcaggtattccatctttaaccgctgtttggggtatgattcacagctaccaaagaaaacttaatgaggcgctaggaacaaatgtacggttcacatccttttcttggtttattaggaattattctgctgtagcaggaaaaaaacttcctgaactgagccttcaaggcgctcagcaaagtaggctcaagcggccaggaattatcgatggcaaatactgtgatttggtatttgatttaataatacacattgatggttatgaagatgacttacaggcagtagatagtaagcctgacattttgaaagcgcattttccatctaactttgcaggtggtgttatgcatcagcctgagcttaactcaaatataaattggtgctgtttatatagtaatgaaaatcagttatttgaaaagttaaggcgactccctttatctggttgttgggttatgccaactgagcacaaaatacaggatttagatgagctactcttattattaaatagtgactctaaactaagcccatctatgatgggatatatgttactcaccgaaccgatggctagagttggatcacttgaaagactgcattgttatgctgaaccagcaataggagtggtgaaatacgaagcggccactagtgtaaggctaaaaggtattggtaactattttaatagcgctttttggatgctagatgcacaagaaaagtttatgctaatgaaaaaagtttaaccggaaaatacttaatggagctctgtaatatattaaaatatgatcgctcgctttaccctggtaaagctgtgtttttttataaaacggctgactctgattttgttccactagaggctgatattaataaaattcgaggccctaaatctggttttactgaagcattcaccccacagttttccccaaaaaacatctcacctcaggacttaacacataataatatattaactctcgaagagtgttatgtacctccaaatgtggagcatatattttgtcggttttctttgagagtacaggctaactcgttggtcccttcaggctgtagtgatccagaggttttttctttattaaaagagttggcagaaacatttaaagaatgcggtggttataaagaactagcagtaagatattgtcgaaatattttgataggtacatggctttggcgtaatcaaaacaccggcaacactcaaattgaaattaaaaccagcaaagggagttgttatttaatcgataacactcgtaagttagcttgggaaagcaaatgggcttctgatgatctaaaagtattggaagagcttagtaatgaaattgagagcgcattaactgatcccaatgtgttttggagtgctgatataaccgcgaaaatagaagcctcattttgccaagagatttacccaagccaaatccttaacgacaaggttaagcaaggagaggcctcaaaacagtttgtaaaagctaagtgtgcagatggccgttacgctgtaagttttaattcagtaaaaataggagcagcccttcagtcaatagatgattggtgggatgaggatgcaagtaaaagattacgagtgcatgagtttggtgctgataaagaaataggggttgcccgacgtcctcctgattctgaacagaatttttattctattttcaaaaatacggaatggtatttgtcagcccttaaaaattgcattactaataaaaatgaaaaaatagacccagctatttattacttattctctgtattgattaagggcggaatgttccagaaaaaagcagaggctaaaaaggcgtaattatgcaaaggtattacttcacagtccactttttaccaaaacaagctaatctagcgctgcttactggccgttgtatttctattatgcatgggtttattttgaagcataatattgaaggaatgggggttacgtttcctgcatggtcggactcatcaattggtaatgaaattgcttttgtttacacggacaaggagattttaaatacccttaaagatcaggcatattttgtggacatgcaagattgtggcttttttaaagtaagccaagttttagctgtacctgacagctgcgaagaagtacgttttatacgtaatcaggcggtagcaaaaattttcacaggtgaaagtagaagaagattaaagcgcctgcaaaaaagagcgttagcaagaggtgaagattttaatcctaaaaagatcgaagctccccgagagattgatattttccatagagtggctatgactagtaagagttcacaagaggattatattctgcatattcaaaagcaagatgttgactgccaagctgagccatactttagtaattatgggcttgcctcaaatgaaaagtttaaaggcacggttccggatttatcaccctcaatagatagaaattaacctttaataaggagatatagcatgtatatacgcaacttgagaaagccatctccaaataaaaatgtatttaaatttgcgagcactaaagttagtagtgtagttatgtgtgagagttcattagagtttgatgcatgttttcatcatgaatataacgatttgatagagagttttgggagtcagcctgaaggctttaaatatgagtttatgggtaaaagtttaccttacacaccagatgcactgatttcatatacagataaaacccaaaaataccacgaatataagccctattctaaaattgcttctccactatttagagctgaatttgctgccaaaagagctgcatcattaaaattggggattgatcttgttttagtaactgataggcaaattagggtaaatccaatattaaacaacttaaagttattacaccgctactcaggtgtttatggtatcagcggcattcaaaaagagttgctcagttttattcataaatcaggggtaatcaagctaaatgatataagctctcaggttgggataccaattggtgaaacacgatcttttttatttgggctcatgcataaagggttggttaaggctgatctagggtgtgatgatttaactaataatccaacattatgggctacaccatgactgacttttttaatgaatttgatgaaagcctggtaccattaaagccacaaacgcccacacaatacgtcaaattagatgatgccaacttaatccagcgtgatttggataccttttcagatacctttaaaaaccaagcactacaaaggtataagctaattagcactatagataaaaaactttcacgcggctggacccaacgaaatttagatcctattttagatgagctttttaaaggaggtgacgtagttcggccaaattggcgaactgttgctcgttggcgcaaaaaatatatcgaaagcaacggtgatatagcctcccttgctgataaaaaccacaaaatgggaaacagaactaaccgtataaaaggggatgataaattttttgataaagcattagaacgatttttagatgctaaaagacctactatagcaactgcatatcagtactataaagaccttattgttattgaaaatgagagtattgtcgaaggcaagattccaataatatcctacaatgcgtttaataaaagaatcaaagcaatacccccatacgcggtcgcggtcgcaaggcatggtaaatttaaagcagaccaatggtttgcttactgcgctgcgcacgtacccccgacaagaatattagagcgtgtagagattgatcatacaccacttgatttaatcctacttgatgatgagttacttattcccataggaagaccttacctaacattacttattgatgtatttagtggctgtgttcttggttttcatcttagttataaatccccttcctacgtatctgctgctaaggctattactcatgcgattaaaccaaagtctcttgatgctctgaatatagaactacaaaatgattggccttgctttggtaaatttgaaaatttagttgtagataatggtgctgagttttggtctaaaaacttagagcatgcttgtcagtcagcaggaataaatatccaatataaccctgtgcgcaagccttggctaaaaccctttatagagcgtttttttggggtgatgaatgaatatttcttacctgaattaccaggaaagacattttcaaatattttagaaaaagaagagtataaacctgagaaagatgcaattatgcgcttctcaacttttgttgaagaatttcaccgctggatcgcggatgtgtatcatcaagacagtaattcacgtgaaactcgaatcccaattaaacgttggcaacaagggtttgatgcatatcccccattgaccatgaatgaagaggaggaaacgcgtttttcaatgttaatgcgcatctcagactcaagaacgttaacgagaaatgggtttaaatatcaagagttaatgtatgactcaacagctttggctgattatcgtaaacattatccgcaaacaaaagaaactgtaaaaaaactgattaaagtagaccctgatgacatctcaaaaatttatgtttatttagaagagttagaaagttatctcgaagtaccgtgtacagatcctaccggctatacggatggtttaagtatctatgagcataaaacaataaaaaaaattaacagggaagtcatacgggaatctaaagatagtttgggcttagcgaaagcacgcatggctattcatgagcgagtaaagcaagagcaagaagttttcattgaatcaaaaactaaagctaagataacagctgttaaaaagcaagctcaaatagctgatgtaagtaatacaggaacgagcactattaaggtttctgaagaaagtgcagcccctgtgcaaaaacatataagtaacgataattctgacgactgggatgatgacttagaggcatttgaatgaatgccttaacagagatacagatagagaagcttcggaactttagcgattgcatcgttatgcacccgcaaattaaaacaatttttaatgactttgatgaattaagattaaaccgtaaatttcagtcagaccaacagtgtatgctattaattggtgatacaggtgttggaaaaagtcataccattaatcactacaaaaaaagagttctagctacacagaattatagtcgaaacactatgccagtcttagtaagtcgtatatctagggggaaaggcttagatgctactttagtccaaatgctggcagatctggagctatttggaagtagtcaaattaaaaagcgaggctacaaaacagaccttactaaaaagctcgtagagagcttaattaaagctcaagtagagctactcatcattaatgagtttcaggagttaatagagtttaaaagcgtacaagaacgacaacaaattgcaaatgggttaaagtttattagtgaagaggccaaagtgccaatagtactggttggtatgccttgggctgcaaaaatagctgaagaacctcaatgggcttctcgcttagttagaaaaagaaaacttgaatactttagcctaaaaaatgacagcaagtactttcgccaatatttgatggggttagctaagaaaatgccatttgatgtacctcctaagctcgaaagtaaaaataccacaatagcgttgtttgctgcatgtcgaggtgagaatcgagcccttaaacatctactgttggaggctttaaaattagcactaagttgtaatgagtatcttgaaaataaacattttattactgcttatgacaagtttgatttttttaatgataaggaaaaactaaaatcaaaaaatccttttaaacaagacattaaagatattgaaatttatgaggtaatcaaaaactcatcttataacccaaatgcattagacccagaagatatgctcacagatcgagtgtttgcaatagtaaagtaacctaggctgctgccaccgctgagcaataactagcataaccccttggggcctctaaacgggtcttgaggggttttttgctgaaacctcaggcatttgagaagcacacggtcacactgcttccggtagtcaataaacgaggaagcggaagagcgtgttgatcggctttaaggatctagtgtcgctgcaaccatagtttgacataatgcaaccataccttgacataattaaagtcatactctgacataaagccccttattaaaaatgatgctaaaaataaattccattataatcaattatttaagaattaattaaaccatagtgtgacatagtggctttttatttgtatagtatgtgtactcaaataataaaaatttacttatgtatatacgcaacttaagaaagccatctccaaataaaaatgtatttaagaggcagtccctcttagaggatccatggagaaaaaaatcactggatataccaccgttgatatatcccaatggcatcgtaaagaacattttgaggcatttcagtcagttgctcaatgtacctataaccagaccgttcagctggatattacggcctttttaaagaccgtaaagaaaaataagcacaagttttatccggcctttattcacattcttgcccgcctgatgaatgctcatccggagttccgtatggcaatgaaagacggtgagctggtgatatgggatagtgttcacccttgttacaccgttttccatgagcaaactgaaacgttttcatcgctctggagtgaataccacgacgatttccggcagtttctacacatatattcgcaagatgtggcgtgttacggtgaaaacctggcctatttccctaaagggtttattgagaatatgtttttcgtctcagccaatccctgggtgagtttcaccagttttgatttaaacgtggccaatatggacaacttcttcgcccccgttttcactatgggcaaatattatacgcaaggcgacaaggtgctgatgccgctggcgattcaggttcatcatgccgtttgtgatggcttccatgtcggcagaatgcttaatgaattacaacagtactgcgatgagtggcagggcggggcgtaatttttttaaggcagttattggtgccctggtaccctgcccaagtcttatgaatgccgtataggcagctgaagataaaaacaatcgattcgatgtttaagttaatgtaattctgccgaaaaggcagtgagtagtaattgaaaaaaccagtcttatatccgggctggtttttttgtttttagcgttataacttttatttcactatgtcactgtatggttgcattttatgtcagtgaatggttgcaggttttttgtaagttattgatatgcctatccagtgtatgtcacgctttgcttgcagcgacatctaggatcttagcgcgcttttatggacgtcaggtggcacttttcccggtaaaccagcaatagacataagcggctatttaacgaccctgccctgaaccgacgaccgggtcatcgtggccggatcttgcggcccctcggcttgaacgaattgttagacattatttgccgactaccttggtgatctcgcctttcacgtagtggacaaattcttccaactgatctgcgcgcgaggccaagcgatcttcttcttgtccaagataagcctgtctagcttcaagtatgacgggctgatactgggccggcaggcgctccattgcccagtcggcagcgacatccttcggcgcgattttgccggttactgcgctgtaccaaatgcgggacaacgtaagcactacatttcgctcatcgccagcccagtcgggcggcgagttccatagcgttaaggtttcatttagcgcctcaaatagatcctgttcaggaaccggatcaaagagttcctccgccgctggacctaccaaggcaacgctatgttctcttgcttttgtcagcaagatagccagatcaatgtcgatcgtggctggctcgaagatacctgcaagaatgtcattgcgctgccattctccaaattgcagttcgcgcttagctggataacgccacggaatgatgtcgtcgtgcacaacaatggtgacttctacagcgcggagaatctcgctctctccaggggaagccgaagtttccaaaaggtcgttgatcaaagctcgccgcgttgtttcatcaagccttacggtcaccgtaaccagcaaatcaatatcactgtgtggcttcaggccgccatccactgcggagccgtacaaatgtacggccagcaacgtcggttcgagatggcgctcgatgacgccaactacctctgatagttgagtcgatacttcggcgatcaccgcttccctcatactcttcctttttcaatattattgaagcatttatcagggttattgtctcatgagcggatacatatttgaatgtatttagaaaaataaacaaatagctagctcactcggtcgctacgctccgggcgtgagactgcggcgggcgctgcggacacatacaaagttacccacagattccgtggataagcaggggactaacatgtgaggcaaaacagcagggccgcgccggtggcgtttttccataggctccgccctcctgccagagttcacataaacagacgcttttccggtgcatctgtgggagccgtgaggctcaaccatgaatctgacagtacgggcgaaacccgacaggacttaaagatccccaccgtttccggcgggtcgctccctcttgcgctctcctgttccgaccctgccgtttaccggatacctgttccgcctttctcccttacgggaagtgtggcgctttctcatagctcacacactggtatctcggctcggtgtaggtcgttcgctccaagctgggctgtaagcaagaactccccgttcagcccgactgctgcgccttatccggtaactgttcacttgagtccaacccggaaaagcacggtaaaacgccactggcagcagccattggtaactgggagttcgcagaggatttgtttagctaaacacgcggttgctcttgaagtgtgcgccaaagtccggctacactggaaggacagatttggttgctgtgctctgcgaaagccagttaccacggttaagcagttccccaactgacttaaccttcgatcaaaccacctccccaggtggttttttcgtttacagggcaaaagattacgcgcagaaaaaaaggatctcaagaagatcctttgatcttttctactgaaccgctctagatttcagtgcaatttatctcttcaaatgtagcacctgaagtcagccccatacgatataagttgtaattctcatgttagtcatgccccgcgcccaccggaaggagctgactgggttgaaggctctcaagggcatcggtcgagatcccggtgcctaatgagtgagctaacttacattaattgcgttgcgctcactgcccgctttccagtcgggaaacctgtcgtgccagctgcattaatgaatcggccaacgcgcggggagaggcggtttgcgtattgggcgccagggtggtttttcttttcaccagtgagacgggcaacagctgattgcccttcaccgcctggccctgagagagttgcagcaagcggtccacgctggtttgccccagcaggcgaaaatcctgtttgatggtggttaacggcgggatataacatgagctgtcttcggtatcgtcgtatcccactaccgagatgtccgcaccaacgcgcagcccggactcggtaatggcgcgcattgcgcccagcgccatctgatcgttggcaaccagcatcgcagtgggaacgatgccctcattcagcatttgcatggtttgttgaaaaccggacatggcactccagtcgccttcccgttccgctatcggctgaatttgattgcgagtgagatatttatgccagccagccagacgcagacgcgccgagacagaacttaatgggcccgctaacagcgcgatttgctggtgacccaatgcgaccagatgctccacgcccagtcgcgtaccgtcttcatgggagaaaataatactgttgatgggtgtctggtcagagacatcaagaaataacgccggaacattagtgcaggcagcttccacagcaatggcatcctggtcatccagcggatagttaatgatcagcccactgacgcgttgcgcgagaagattgtgcaccgccgctttacaggcttcgacgccgcttcgttctaccatcgacaccaccacgctggcacccagttgatcggcgcgagatttaatcgccgcgacaatttgcgacggcgcgtgcagggccagactggaggtggcaacgccaatcagcaacgactgtttgcccgccagttgttgtgccacgcggttgggaatgtaattcagctccgccatcgccgcttccactttttcccgcgttttcgcaga

SEQ ID NO: 78 - DNA, 15723 bp, Artificial sequence
  Synthetic
aacgtggctggcctggttcaccacgcgggaaacggtctgataagagacaccggcatactctgcgacatcgtataacgttactggtttcacattcaccaccctgaattgactctcttccgggcgctatcatgccataccgcgaaaggttttgcgccattcgatggtgtccgggatctcgacgctctcccttatgcgactcctgcattaggaaattaatacgactcactataggggaattgtgagcggataacaattcccctgtagaaataattttgtttaactttaataaggagatataccatggcctcactgccgcatacgcagctgaaaatagtacagcgcggctgaaatcatcattaaagcgcctcactgccgcatacgcagctgaaaatgaattcggatccgagcgaaggagattaacttatgctgctactctcaagaccaacacccaacaaacttgaaagcctgagaggctatatcctccgtttatcgcaagcaaatagctaccatacaacccagtatgttttagagctggcagacctttggactggtagaaactatgatactgccagcaagtacgtttttggtgatagcaacttgagtaagttggcaaagatcaccaacacttccaagggagagttggaggctttacggtacgggcttgatgaccaaaaacagtcgagtattcatggccatctaattagtaatgagcatttgaggctggattacccacgagtctgtcctgagtgtcttgagtccaacaatatagctctcgctgtatgggatattccggcactgactgtttgccctgtgcatcacatgagtctttttgattattgtcctgaatgcaatacccgccttcgttggaatcgaccggctgtacatcagtgtcataagtgcaactgcgactttcgctcttatacgagtgataaattgtctgaaaaacaataccgcttatccagacttatccatcagctctgtatgatagataaaataaaccaccgaatgattccaaacgtattgaaaaatcatagcctggcggaggttctcagcctggtcagctctattgcattttttgattatcatctattgggtgatcagagcaaagatgggaaatttctttctttgaaaaccgctccaaactatcggctacatgaacattacactaatgctatgaagcatctggataactggccccataacttttatcagtttatggctgagagccggcagaatcgtaggagtcagggaatgaaagaaggtataagcaaagaagtgggggggatcttttattttcttcgcgccaataatgaaaaggccatatataggcctttatgggaggcctattgcaacttcagagaggtagctgcgcgaaaaaccctcgatgagctacgccttgctcgtattcatgcaaaaaatattcccgtcagcaccgcagctaaagagcttaagatacgtcctgagcagcttcgtaagttctgtgaaaggcttaatataccgttagaaaccgcctataaggatgtcaaactgatttcccgagagcaagtggctgatctaaaggattttatcagtaagttactgaccatcagacagtccgcagacattatgggtatctcggtgtatcaactccgagcgatggttcgtaaagatgttattactccattgcgtggtccaaccattgatcaatcaagagactggtactttgagccagaatctatagaagcctttcatcagcagatagccaagtattgtttatacaaaggtgcaaagcgtactcatgatatggatctaaaacaggctttagaacaactttcatactaccaaatggggttggctgagatcgttcaggccatttccgcaggtaaattacgacctgccagcgagagtaaagcgatcacgttaaatgcactccagttttcagctgaggaaatcaaagcacttcggccagagctgaaatcaaataatgactattggcagccaccggagatagaaaaataccttggctgtaaaaaagatcttgtttacgggttgttgaaaagtggccatttacctatggaaaaggtcagtctccccggtagaacccgccctgttgtcgcgtgtaaaaaatctgaggtgaaagcatttaatgaaaacttttacttgcttcgtactctcagccgaaaaacgggagttgtcagtgaaaaattaagaaaactgctggaagccaaaaaaatccaacccgtttctggtcctactgttgatggcggttactgtcacttttacaaaaagaataaaaacattgataaactcctgaaggagttgggtgctaagtgaggatccggaaaggagattaactaatgctattatcaagaccttatatacaggatgatgaatctattgaaagctatattatccgtctttcaggagccaacggttatacggttagacagtttgtaaatatttattttacaggctttcaatcttataaggattttgataaatatacaccacctcttaaacttgttaatctcaatcatggttgttttaagaataaagatcgtatatctttttttgagttaatcagttcttctacgaggcaggataaagcaagattattcaacaatttagtagaatctgtaccttctgaaaatcttgaattgtcaaaatatatttataaaggggtcgaggttcctgcttgcctattcaggagtgagtcagtacctatatgcccattatgtttagttgattctccttatattagacagtattggcatatagctttagttcaatgttgttcaaagcataaaatagatttattgaagtcttgccctcgttgtcagactactatttcatatttgaatcatgagttgatattgtgctgtccttgtggttatagttttatccaggagccatcttcctatcttaacaaaaatcatgatgaggtacttctatcgctggtagacctaatttatagcagcatgactgagaatagtattcgagcagaattaagttcattaccttcagataacatttatacaatttttggaatggccgttttttattttcaatatttgggtaaacttacacacttgtcaaaaaaattttatgcatttttagatttcattagaaggtggcctcgtagctatatagcgttgctatctgagaatgctgacaagggtctgcgttatcttattaaaccatctaatgaatcagagtttaagtccatttttggtagcttattaaataatattaagcgtctacctaataatttagataaggatgatttgattaagaaggagacatacgctttcttccgtcagaggttgttgttggataaaaaaaatgaaaataaaaactctgtctcaaatctgctgttgactaaagatgaagtggcattattgttaggtgtatcaacggatcgagtagccaagctgacttctaaaggaaagttgtgtgcaaaacgaaagaccttaaaggcttatgtgggcagttatccattgggcgaggtatttgatcttttgagcgaaacagattctgctatattttagtccggaaggagaatatgcatggcgttcatagaattagatattggatacaatatcgagtcgaggtcaactttggaattttctacctctatgctctctgttccttcagatattacaggaaaggtaaacagtttctttgcccaaattataaatcagtccaataaatctaagtcaagtctttcaggaacgccattacagacagctagatcattacttaaaagcaagctgttcattattgatgcttgtcaatccttaaaaggttttctgactcataatcctaaaatttatgatgctaaagtccgaggaagggttttttcattgtcagtaaactctggaactgattcctcttatatttatggtgactcagttagctaccatcatcaatacgattgggcaggtaacgccggatacatatcaaagcgatatttcctttgcactgagtttatatataaaggagataatacaacgctgtatcatgagttcctcaaagagtcatcggagcttgtggagatgcttacagggctagggctaacaagtaagcatcgagaacttatcaaaacctcttgcctagctcatcaagatagtgcttttccaaactctgtgcccccctatcaggttcaagtgcttattccatatactgatgtaaacaagaatacagaatatatttcggtttcgccaatatctgcctcaaaggttcaagcggctatacacaccttttgtcatagcgaaaatgctcacacagtgggtcggtcttttcattatccgaccaggccggaaaatattggtgctttagcgatctctacaggtggaagtattggagtgctggcaccggatataatcttggaatcagagattgtacccacttcttcagacatactgaaagagcttagagttaacgtcaacaaggatctttttgatacttctaatctggactttagttattttcttaaactacgaaagaaagctgactttgcgataggtcggtacatccccactccaaagtcgtcccaaaaagccgcgtttctcgacatcatcaagaacaatgtggagaaaatgttctctaaactagataaactccggcttgctgttcagcttggagttctgcatgaagataaggtcgatgggctaaacttagttcaaagaagttatgtaatcgagcagaaactttctgaggcgataatgaatcaggtatggactcaggctaataattctattcagaaatttatctcagggactcactacaaacaaattgcttatcaccctacgcttacccgttatattagcgaaagtgttcggcgtcatctacaacctgtattcagaggtaatattgagtcctcaaagccggaaattgtcactgatggtcatgaaggggagaaagaagatactaatgagccaattaaaacagctgccaatgccattgttttcatagtcatccccaggctgacggttatagatgctcatgcagatagttcggcatacacaacaggcctccccggaatcactgctcttgttggttatgttgataagctttgcagaaatattcaaattcaaactaaggtcgaaattgataacatcgaagtagcctggcttcttcgtgattttcagcgtattgagggtatgaaaaaacacgagccagctcgttgggacagtaaaaagaaaacaactttgagtgatgttgtcagtcgtaaattctgtaacctatcgtttgacttgattttaaaatgttctgcggactatgagcaactcaactgcttaaaggaggagttgccagattgcctgcccgctaaatttgcttcaggcatggtcagtactgcggaagagatttccacaaaaaattatatgtcagaatctttcttgatttttcagtcagagcaagatttgcttaatgaactccaatccgaagattctcttcgctgggctgtgcttgattactcagaaaagtttgtacgtaagtcagattctatactagaggatctggcagatgctttccttgagtacaaggaacagaaccctcgctggaaccaactcacggtttcaaatgttggtttcaaattattggaggagcctgtcacgcgaccgaatagcaggcttacacatcatgcgtatgcagaacctgtgatcggtgtacaagagttgtggttgataaaaaatctgtctccagaagtgtttggcacattaccgattttttgggcatatcgatcggcaggaaaaagaatcctgtgccaagcataatattgaggagatatcctatgatacttccaacgatccttacctatgaaaagtctctggcgccttctgttgccctgatgtttgcaaaaacgtacgacaataaaaaggttccgattgaggtttatgatgcaaaagggcggggagcgcaaacaacctttactgcctgtcatggaactaaagatacagacttaggtgagtggttgcctgtaaggcaagatatttgtcatttaccacatgatgccagtgagttaataattgagttcccccttaaatactctcctaattccatgaagccagggtcttgtaatgttgccgattggactaccctgctaaaggagatggctctcctctatggggaaaaagggggctatttatatcaggcatactgtcagatggatgctctttttcaagctgttcccttttggaggaataaagatgctgaaagcatgacattacgggttatgaatatcagtgatagcatcctgccaccttatgttttcacaaatcttccatgttctattgatgaactgattggtagtgacaagcagcagcttgattcacttatcaaaaatatcgaaagcgcattgacgggtaaacgaaattttttacgccttcgagttatcgcagaattaaagaaagatattcttgaagaagtgcacccaagccagcaatttattgaaaagttacctgaagctaaaaaagaatacctccatcgacagggaaggtatcagaagtccaggcaatatgtctcttacaacctgggtaattttcgtcaggccatgttacgcccaacaaaaataggagccggtttacggcctgatcgatggaatgatgtcgctaaagaggttccagtgagtgtttatgggctcgacccggaaagccatgcagcgataagagggcgtggcactaagaacgatttctatactctgatcagtaacatcaaaaagcatattgagacactcagagcttttgacggtgatatgtttaatgatgagtcgatactaactcttggcaatattcacttcattatggccaacttgattaaaggcggtgtgtataaccgagaaagctccaagacaaaaaataaaggtgagccagatgaatgcccaatcgatttaagtaatccgtgaggagaaattttatgaattatctgtcatttaaaattattcctgacgatgcagatccaaggtttttattaggctatatacttcaagaggctcatcctataattgctcgttatggcaataataaaattggtacgttgtttcctgaatggaatgtcgatgaacctggtcgttcaattgctttttgtggagcattggatgttctaaatagaatcatgaaacacgaatatttcagggttatgattgatgctggggtgttaaaatacaatttactagacattgatcctatcaatcatcagaaagtgatttttttaaagaatcagaaaatcaccagcaatacgcctaaacgccagcaaggaaagatcaaacggataataaaaaggcagatagagagaggtgaaattcaaagtgccagagagtatcgacccagaacagatcaacaacagactgacatgccagacgttttctaccatcttttttttcttgatagtaagagcactgagcagattatgccactctgcattcaaatgataccagtcgctgagagtgaaggaatagtcggtactcagacctttgatcactatggattcagcacacttgagcaacatcgtgcggtagtgcctctgatttcaccaatattttaaaaggaggtaccataatgacaccacttcttagtcagtatgtaggatcaaggaagctgactccgggaaggcatcgctataaatatccaagcaggaaaatggaagcacacgtaatcactgaatctccaaatgaatgtaatttttgcgagtttcttgagtttgacagccgtgttaagggatatatttctcaaccaaaaactattatatatgacttatatcaatgtggtcatgattatactgccgatttttttgttgacttatatttatcgaaacctgccttctatgaaataaaaccgaaggattatgaaaaaagtgaggaggaagaagataaattctatgaggttgagaaggtgttttatgatatgggctttaatttttatttggtaacaggtgattatattgagaaaggaaatcgtttaattaattttaagaaacttcgtaggtttgtcggtagcttaccagaaagaaaaatacgagagtttattgagaggttggtctttgaaagtaatgaaggcatatctttcggcgatctgattgctaaattaagaaatcagttggatgttgaggaaagggacgcttttcaaaatatctatcaatgtatagcaaataaaatcattgggtttgatattgatagatataaattaaatcagtctgtaatggtaggtgtctggaatgagagcttcgatagagcctggaatggagtaccgattcaggaatagggtttatagtattgtctccgtgggtgattccgagatgatcgtgatggatcggtatgatgaggaagaaattcatatatctaaagatgagttcaataagtgctggattaaaaatgaaataaaacttgtctcaggacgaatggctaattcagtaaaaaacaaattaaaaacgccagtatcaacgctcagtgaggagcaaaaaaaggtagcggtgcgaaaggaagagtatataaaaaaatttcttgacaagaaagatgcgctaagaaaatccgagactgatttagattattctaaaataattgttgaaattgcggctgaactgaaagatccatatcctccatcattaagaactctaatgagatggaaaagcgactacaatgcagcaaatggatctatacgatcattaattaatgggttttctaattctggcagaaagtcaaatttaaataaatgccaaaaagagctgattgaaaaggcaatagataatgtataccttcagccggaaaaaggaacagtggctcaaacgcatagtgaactcggagttcttgtggagatacataatcgggagaacaaagataatgaaagtatgataattaaatgtccaagccgatttcaagtacagaaagcaatagaaaatcttgattatttaaccaaactcgagaaaagagaaggaaagcgagaagcggctagagatgtgcgtacatctaagcataattatcgacccgaaaggatattggagataggtgaaactgatcatacattactcgactactatgtgatagatgatgatttactcatgcctcttgggcgaccgtggatgactaatataatggaattgtattctcgaatacctttaggctctgagataacctatgaaaatggtagctttattacaatcgctaatgccctaaaaatgtcaatactaccaaagagcaatttctacgaaatgtatcctgatattaaaaatacaaccaattattcaggcattcttgaaagtcttagaacggataatggagcagactttatatcgaatgacctagatgatgcagcactggaaatcggtatgattctacatcatgttcaggttacaaaatcttggcagaaaggagccatagaaggtttttttaggaagcagaacgtaatgctacttgataagattaaagggaaaaccttcagcaatatactagagcgtgcaaagtatgaccctaaaaagcaatcgttgataagactgtctgatttcaaaaatattttatacaagtggctatacgatgtttatccatataatgaagtaagagtagagcatggtaaaaaaataattccccataaactctgggaaaaaaacataaaggatcatcctcaagattttattgaaaaatctaacttggatattatttttggaaaaacaggcagtagaaaagcacgagacaaaggaatagagataaataacctgaagtatgatggtattgatttaactaaatttagagcatctcatggtaataatgaaaccgtcaaggttaagttcgatccatctgatctaggatttatacatttttttgataagtttgagaagcgctttattaggcttaatgctgtcgacagtgaatatgcaaataaacttactttatatcaacatggaattattaaaaagtatgtaaaagaggatatgagacgaagtgaggaggatataaaggttctgatggatgggaagattcaattaagagatatgatcaatgacttgttagaaaataagccgagtaaattagcttcaaaaagaggtgcgcagttgcgacagggaatgactaactctattgcggatgcaggtgaaaatcaaagagattcgataccaagattagaagaaaatcaaatcagttcggtgtcagatgttagtgttgaaagtactgcatgtgattcaattatctctgactccaagggtacagaagaaagtaaaaaaaacaccagttacgaaaagtggactgatgatgacatagagtggtagtaatatgatgaatatagaaaaagaaatttattataattgcttcatacccacttcaagaattgttgatgttattaatgatatgatcaaatgtaaaaaaagttttgatacaaagatggagccaatttcaatgatgattatggcgggaagtggatatggaaagacattattgattaactatttctcctcaaaatacccgccggttactgagaaaaatgataagggggaacaggataagaaagaagtcttagtcgtaacgttaagatcaaattcaactaaaaaagatgctgcaaccgaaatgttaaaggctcttggtgatccaaatccagataaaggaagtttattgcagcagacggaccgcattttgacattattgtgtctatgtggtgtaaaggttatcattattgatgagtttagccatattgttcagagcaacagtagtcgggttttaggtaaaacagcagattggattaaagatataattaagccacccaaagacaatccgaaggaatgcccaaaaataccgttaattgcagtcggaatgtacagtagcataaaaatccttcagtcaaatcctcagttggatacactcgttaccaaaaagtcatatctttttccttatggcatatctcaaaaagatgagctcgatttttacaagatttttttaagcaatgttggtaataaaataaagaatcttggcttggaaatagatctcgaagatccagagatctacttgagactttttgctgcatctaacggtattccgcgattactaatgaagataatctcatgtgcttgtggtatcggttgttcaaggggtgataataaaattgtggatgtctcctgttttgaaaatggctttgaggatgtctttggaaagcaaaagaaaaatccatttaaagccacgtcgctgaaagatattccctttactgagagtacaacttatacgacgtgggtggaatcaaaatgtagtcatgcggttcttgaaggaaaaaacaatggtttattagatgtggtttttaaaactggaaaatcaaaaggttttatttagcctaggctgctgccaccgctgagcaataactagcataaccccttggggcctctaaacgggtcttgaggggttttttgctgaaacctcaggcatttgagaagcacacggtcacactgcttccggtagtcaataaacgaggaagcggaagagccaatctggttgagattatttaacgttggttttttaagtaaagattgtcatttttaaattatagtatgacataaaattcaaggaaagattggcacaatagatgtttagcttctataaatagatacagatgttttgaatctgtttataggagctcaaattaatgacaccacttcttagtcagtatgtaggatcaaggaagctgactccgggaaggcatcgctataaatatccaagcaggaaaatggaagcacatgtaatcactgaatctccaaatgacatgcgagataaggtactgaggatccatggagaaaaaaatcactggatataccaccgttgatatatcccaatggcatcgtaaagaacattttgaggcatttcagtcagttgctcaatgtacctataaccagaccgttcagctggatattacggcctttttaaagaccgtaaagaaaaataagcacaagttttatccggcctttattcacattcttgcccgcctgatgaatgctcatccggagttccgtatggcaatgaaagacggtgagctggtgatatgggatagtgttcacccttgttacaccgttttccatgagcaaactgaaacgttttcatcgctctggagtgaataccacgacgatttccggcagtttctacacatatattcgcaagatgtggcgtgttacggtgaaaacctggcctatttccctaaagggtttattgagaatatgtttttcgtctcagccaatccctgggtgagtttcaccagttttgatttaaacgtggccaatatggacaacttcttcgcccccgttttcactatgggcaaatattatacgcaaggcgacaaggtgctgatgccgctggcgattcaggttcatcatgccgtttgtgatggcttccatgtcggcagaatgcttaatgaattacaacagtactgcgatgagtggcagggcggggcgtaatttttttaaggcagttattggtgccctggtaccgtctagtagtcgttgttcacacgatcttgttttaatgctccatccagtaaaagaactgaattctgttccgtacttgactgagtgtgtaaatttacgactcaaaatattagtacattagtattgccttgtaggttttgaagaaaatgccaatcattacttaaaaaatgtgacaatcattttttaaatatttttcagccgaattttcataacttattgatttatgaggttattgtttgtgacattctatgccaaacttttattaaaccaccaaacgttgtcgtttaatttatcagctgacgtcaggtggcacttttcccggtaaaccagcaatagacataagcggctatttaacgaccctgccctgaaccgacgaccgggtcatcgtggccggatcttgcggcccctcggcttgaacgaattgttagacattatttgccgactaccttggtgatctcgcctttcacgtagtggacaaattcttccaactgatctgcgcgcgaggccaagcgatcttcttcttgtccaagataagcctgtctagcttcaagtatgacgggctgatactgggccggcaggcgctccattgcccagtcggcagcgacatccttcggcgcgattttgccggttactgcgctgtaccaaatgcgggacaacgtaagcactacatttcgctcatcgccagcccagtcgggcggcgagttccatagcgttaaggtttcatttagcgcctcaaatagatcctgttcaggaaccggatcaaagagttcctccgccgctggacctaccaaggcaacgctatgttctcttgcttttgtcagcaagatagccagatcaatgtcgatcgtggctggctcgaagatacctgcaagaatgtcattgcgctgccattctccaaattgcagttcgcgcttagctggataacgccacggaatgatgtcgtcgtgcacaacaatggtgacttctacagcgcggagaatctcgctctctccaggggaagccgaagtttccaaaaggtcgttgatcaaagctcgccgcgttgtttcatcaagccttacggtcaccgtaaccagcaaatcaatatcactgtgtggcttcaggccgccatccactgcggagccgtacaaatgtacggccagcaacgtcggttcgagatggcgctcgatgacgccaactacctctgatagttgagtcgatacttcggcgatcaccgcttccctcatactcttcctttttcaatattattgaagcatttatcagggttattgtctcatgagcggatacatatttgaatgtatttagaaaaataaacaaatagctagctcactcggtcgctacgctccgggcgtgagactgcggcgggcgctgcggacacatacaaagttacccacagattccgtggataagcaggggactaacatgtgaggcaaaacagcagggccgcgccggtggcgtttttccataggctccgccctcctgccagagttcacataaacagacgcttttccggtgcatctgtgggagccgtgaggctcaaccatgaatctgacagtacgggcgaaacccgacaggacttaaagatccccaccgtttccggcgggtcgctccctcttgcgctctcctgttccgaccctgccgtttaccggatacctgttccgcctttctcccttacgggaagtgtggcgctttctcatagctcacacactggtatctcggctcggtgtaggtcgttcgctccaagctgggctgtaagcaagaactccccgttcagcccgactgctgcgccttatccggtaactgttcacttgagtccaacccggaaaagcacggtaaaacgccactggcagcagccattggtaactgggagttcgcagaggatttgtttagctaaacacgcggttgctcttgaagtgtgcgccaaagtccggctacactggaaggacagatttggttgctgtgctctgcgaaagccagttaccacggttaagcagttccccaactgacttaaccttcgatcaaaccacctccccaggtggttttttcgtttacagggcaaaagattacgcgcagaaaaaaaggatctcaagaagatcctttgatcttttctactgaaccgctctagatttcagtgcaatttatctcttcaaatgtagcacctgaagtcagccccatacgatataagttgtaattctcatgttagtcatgccccgcgcccaccggaaggagctgactgggttgaaggctctcaagggcatcggtcgagatcccggtgcctaatgagtgagctaacttacattaattgcgttgcgctcactgcccgctttccagtcgggaaacctgtcgtgccagctgcattaatgaatcggccaacgcgcggggagaggcggtttgcgtattgggcgccagggtggtttttcttttcaccagtgagacgggcaacagctgattgcccttcaccgcctggccctgagagagttgcagcaagcggtccacgctggtttgccccagcaggcgaaaatcctgtttgatggtggttaacggcgggatataacatgagctgtcttcggtatcgtcgtatcccactaccgagatgtccgcaccaacgcgcagcccggactcggtaatggcgcgcattgcgcccagcgccatctgatcgttggcaaccagcatcgcagtgggaacgatgccctcattcagcatttgcatggtttgttgaaaaccggacatggcactccagtcgccttcccgttccgctatcggctgaatttgattgcgagtgagatatttatgccagccagccagacgcagacgcgccgagacagaacttaatgggcccgctaacagcgcgatttgctggtgacccaatgcgaccagatgctccacgcccagtcgcgtaccgtcttcatgggagaaaataatactgttgatgggtgtctggtcagagacatcaagaaataacgccggaacattagtgcaggcagcttccacagcaatggcatcctggtcatccagcggatagttaatgatcagcccactgacgcgttgcgcgagaagattgtgcaccgccgctttacaggcttcgacgccgcttcgttctaccatcgacaccaccacgctggcacccagttgatcggcgcgagatttaatcgccgcgacaatttgcgacggcgcgtgcagggccagactggaggtggcaacgccaatcagcaacgactgtttgcccgccagttgttgtgccacgcggttgggaatgtaattcagctccgccatcgccgcttccactttttcccgcgttttcgcaga

SEQ ID NO: 79 - DNA, 88 bp, Artificial sequence
  Synthetic
gtgaactgccgaataggtagctgataatagtacagcgcggctgaaatcatcattaaagcggtgaactgccgaataggtagctgataat

SEQ ID NO: 80 - DNA, 88 bp, Artificial sequence
  Synthetic
gtaacctgccggataggcagccaagaatagtacagcgcggctgaaatcatcattaaagcggtaacctgccggataggcagccaagaat

SEQ ID NO: 81 - DNA, 88 bp, Artificial sequence
  Synthetic
gtgacctgccgtataggcagctgaaaatagtacagcgcggctgaaatcatcattaaagcggtgacctgccgtataggcagctgaaaat

SEQ ID NO: 82 - DNA, 88 bp, Artificial sequence
  Synthetic
cctcactgccgcatacgcagctgaaaatagtacagcgcggctgaaatcatcattaaagcgcctcactgccgcatacgcagctgaaaat

SEQ ID NO: 83 - DNA, 88 bp, Artificial sequence
  Synthetic
tcattactactaaaaagtagctgataacagtacagcgcggctgaaatcatcattaaagcggaatactgccgaacaggtaggaggctca

SEQ ID NO: 84 - DNA, 88 bp, Artificial sequence
  Synthetic
gtaacctgccggataggcagccaagaatagtacagcgcggctgaaatcatcattaaagcgctattatgctggaaaagcagtaaaacat

SEQ ID NO: 85 - DNA, 88 bp, Artificial sequence
  Synthetic
gtgacctgccgtataggcagctgaagatagtacagcgcggctgaaatcatcattaaagcgtaattctgccgaaaaggcagtgagtagt

SEQ ID NO: 86 - protein, 29 aa, Artificial sequence
  Synthetic
GCGCGKRTADGSEFESPKKKRKVGSGSGG

SEQ ID NO: 87 - protein, 16 aa, Artificial sequence
  Synthetic
KRPAATKKAGQAKKKK

SEQ ID NO: 88 - protein, 25 aa, Artificial sequence
  Synthetic
MSRRRKANPTKLSENAKKLAKEVEN

SEQ ID NO: 89 - protein, 18 aa, Artificial sequence
  Synthetic
KRTADGSEFESPKKKRKV

SEQ ID NO: 90 - DNA, 6 bp, Artificial sequence
  Synthetic
  misc_feature (1)..(1): n is a, c, g, or t
naaaac

SEQ ID NO: 91 - DNA, 7 bp, Artificial sequence
  Synthetic
  misc_feature (1)..(2): n is a, c, g, or t
nnagaaw

SEQ ID NO: 92 - DNA, 8 bp, Artificial sequence
  Synthetic
  misc_feature (1)..(4): n is a, c, g, or t
nnnngatt

SEQ ID NO: 93 - DNA, 6 bp, Artificial sequence
  Synthetic
  misc_feature (1)..(2): n is a, c, g, or t
nnagaa

SEQ ID NO: 94 - protein, 844 aa, Artificial sequence
  Synthetic
MGPKKKRKVGSGMATSLPTPSAITTSALEYAFHTPARNLTKSRGKNIHRYVSVKMSKRITVESTLECDACYHFDFEPSIVRFCAQPIRFLYYLNGQSHSYVPDFLVQFDTNEFVLYEVKSAYAKNKPDFDVEWEAKVKAATELGLELELVEESDIRDTVVLNNLKRMHRYASKDELNNVHNSLLKIIKYNGAQSARCLGEQLGLKGRTVLPILCDLLSRCLLDTRLDKPLSLESRFELASYGAKKGFSSFHRKAVSSQDTLESIELVSSANCLESVTYQDISAFPETIAVEINFRLSILRFLARKCETIVAKSIEPHRVELQQNYSRKIPSAITIYRWWLAFRKSDYNPISLAPNIKDRGNRETKVSTVVDSIMEQAVERVISGRKVNVSSAYKRVRRKVRQYNLTHGTKYTYPKYESVRKRVKKKTPFELLAAGKGERVAKREFRRMGKKILTSSVLERVEIDHTVVDLFAVHEEYRIPLGRPWLTQLVDCYSKAVIGFYLGFEPPSYVSVSLALKNAIQRKDDLISSYESIENEWLCYGIPDLLVTDNGKEFLSKAFDQACESLLINVHQNKVETPDNKPHVERNYGTINTSLLDDLPGKSFSQYLQREGYDSVGEATLTLNEIREIYLIWLVDIYHKKPNQRGTNCPNVAWKKGCQEWEPEEFSGSKDELDFKFAIVDYKQLTKVGITVYKELSYSNDRLAEYRGKKGNHKVQFKYNPECMAVIWVLDEDMNEYFTVNAIDYEYASRVSLWQHKYNMKYQAELNSAEYDEDKEIDAEIKIEEIADRSIVKTNKIRARRRGARHQENSARAKSISNANPASIQKHEDEIVSADNDDWDIDYV

SEQ ID NO: 95 - protein, 842 aa, Artificial sequence
  Synthetic
MATSLPTPSAITTSALEYAFHTPARNLTKSRGKNIHRYVSVKMSKRITVESTLECDACYHFDFEPSIVRFCAQPIRFLYYLNGQSHSYVPDFLVQFDTNEFVLYEVKSAYAKNKPDFDVEWEAKVKAATELGLELELVEESDIRDTVVLNNLKRMHRYASKDELNNVHNSLLKIIKYNGAQSARCLGEQLGLKGRTVLPILCDLLSRCLLDTRLDKPLSLESRFELASYGAKKGFSSFHRKAVSSQDTLESIELVSSANCLESVTYQDISAFPETIAVEINFRLSILRFLARKCETIVAKSIEPHRVELQQNYSRKIPSAITIYRWWLAFRKSDYNPISLAPNIKDRGNRETKVSTVVDSIMEQAVERVISGRKVNVSSAYKRVRRKVRQYNLTHGTKYTYPKYESVRKRVKKKTPFELLAAGKGERVAKREFRRMGKKILTSSVLERVEIDHTVVDLFAVHEEYRIPLGRPWLTQLVDCYSKAVIGFYLGFEPPSYVSVSLALKNAIQRKDDLISSYESIENEWLCYGIPDLLVTDNGKEFLSKAFDQACESLLINVHQNKVETPDNKPHVERNYGTINTSLLDDLPGKSFSQYLQREGYDSVGEATLTLNEIREIYLIWLVDIYHKKPNQRGTNCPNVAWKKGCQEWEPEEFSGSKDELDFKFAIVDYKQLTKVGITVYKELSYSNDRLAEYRGKKGNHKVQFKYNPECMAVIWVLDEDMNEYFTVNAIDYEYASRVSLWQHKYNMKYQAELNSAEYDEDKEIDAEIKIEEIADRSIVKTNKIRARRRGARHQENSARAKSISNANPASIQKHEDEIVSADNDDWDIDYVGSGPKKKRKV

SEQ ID NO: 96 - protein, 861 aa, Artificial sequence
  Synthetic
MATSLPTPSAITTSALEYAFHTPARNLTKSRGKNIHRYVSVKMSKRITVESTLECDACYHFDFEPSIVRFCAQPIRFLYYLNGQSHSYVPDFLVQFDTNEFVLYEVKSAYAKNKPDFDVEWEAKVKAATELGLELELVEESDIRDTVVLNNLKRMHRYASKDELNNVHNSLLKIIKYNGAQSARCLGEQLGLKGRTVLPILCDLLSRCLLDTRLDKPLSLESRFELASYGGSGSGKRTADGSEFESPKKKRKVGSGSGGAKKGFSSFHRKAVSSQDTLESIELVSSANCLESVTYQDISAFPETIAVEINFRLSILRFLARKCETIVAKSIEPHRVELQQNYSRKIPSAITIYRWWLAFRKSDYNPISLAPNIKDRGNRETKVSTVVDSIMEQAVERVISGRKVNVSSAYKRVRRKVRQYNLTHGTKYTYPKYESVRKRVKKKTPFELLAAGKGERVAKREFRRMGKKILTSSVLERVEIDHTVVDLFAVHEEYRIPLGRPWLTQLVDCYSKAVIGFYLGFEPPSYVSVSLALKNAIQRKDDLISSYESIENEWLCYGIPDLLVTDNGKEFLSKAFDQACESLLINVHQNKVETPDNKPHVERNYGTINTSLLDDLPGKSFSQYLQREGYDSVGEATLTLNEIREIYLIWLVDIYHKKPNQRGTNCPNVAWKKGCQEWEPEEFSGSKDELDFKFAIVDYKQLTKVGITVYKELSYSNDRLAEYRGKKGNHKVQFKYNPECMAVIWVLDEDMNEYFTVNAIDYEYASRVSLWQHKYNMKYQAELNSAEYDEDKEIDAEIKIEEIADRSIVKTNKIRARRRGARHQENSARAKSISNANPASIQKHEDEIVSADNDDWDIDYV

SEQ ID NO: 97 - protein, 861 aa, Artificial sequence; identical to SEQ ID NO: 96
  Synthetic

SEQ ID NO: 98 - protein, 883 aa, Artificial sequence
  Synthetic
MDYKDHDGDYKDHDIDYKDDDDKATSLPTPSAITTSALEYAFHTPARNLTKSRGKNIHRYVSVKMSKRITVESTLECDACYHFDFEPSIVRFCAQPIRFLYYLNGQSHSYVPDFLVQFDTNEFVLYEVKSAYAKNKPDFDVEWEAKVKAATELGLELELVEESDIRDTVVLNNLKRMHRYASKDELNNVHNSLLKIIKYNGAQSARCLGEQLGLKGRTVLPILCDLLSRCLLDTRLDKPLSLESRFELASYGGSGSGKRTADGSEFESPKKKRKVGSGSGGAKKGFSSFHRKAVSSQDTLESIELVSSANCLESVTYQDISAFPETIAVEINFRLSILRFLARKCETIVAKSIEPHRVELQQNYSRKIPSAITIYRWWLAFRKSDYNPISLAPNIKDRGNRETKVSTVVDSIMEQAVERVISGRKVNVSSAYKRVRRKVRQYNLTHGTKYTYPKYESVRKRVKKKTPFELLAAGKGERVAKREFRRMGKKILTSSVLERVEIDHTVVDLFAVHEEYRIPLGRPWLTQLVDCYSKAVIGFYLGFEPPSYVSVSLALKNAIQRKDDLISSYESIENEWLCYGIPDLLVTDNGKEFLSKAFDQACESLLINVHQNKVETPDNKPHVERNYGTINTSLLDDLPGKSFSQYLQREGYDSVGEATLTLNEIREIYLIWLVDIYHKKPNQRGTNCPNVAWKKGCQEWEPEEFSGSKDELDFKFAIVDYKQLTKVGITVYKELSYSNDRLAEYRGKKGNHKVQFKYNPECMAVIWVLDEDMNEYFTVNAIDYEYASRVSLWQHKYNMKYQAELNSAEYDEDKEIDAEIKIEEIADRSIVKTNKIRARRRGARHQENSARAKSISNANPASIQKHEDEIVSADNDDWDIDYV

SEQ ID NO: 99 - protein, 930 aa, Artificial sequence
  Synthetic
MATSLPTPSAITTSALEYAFHTPARNLTKSRGKNIHRYVSVKMSKRITVESTLECDACYHFDFEPSIVRFCAQPIRFLYYLNGQSHSYVPDFLVQFDTNEFVLYEVKSAYAKNKPDFDVEWEAKVKAATELGLELELVEESDIRDTVVLNNLKRMHRYASKDELNNVHNSLLKIIKYNGAQSARCLGEQLGLKGRTVLPILCDLLSRCLLDTRLDKPLSLESRFELASYGGSGSGKRTADGSEFESPKKKRKVGSGSGGAKKGFSSFHRKAVSSQDTLESIELVSSANCLESVTYQDISAFPETIAVEINFRLSILRFLARKCETIVAKSIEPHRVELQQNYSRKIPSAITIYRWWLAFRKSDYNPISLAPNIKDRGNRETKVSTVVDSIMEQAVERVISGRKVNVSSAYKRVRRKVRQYNLTHGTKYTYPKYESVRKRVKKKTPFELLAAGKGERVAKREFRRMGKKILTSSVLERVEIDHTVVDLFAVHEEYRIPLGRPWLTQLVDCYSKAVIGFYLGFEPPSYVSVSLALKNAIQRKDDLISSYESIENEWLCYGIPDLLVTDNGKEFLSKAFDQACESLLINVHQNKVETPDNKPHVERNYGTINTSLLDDLPGKSFSQYLQREGYDSVGEATLTLNEIREIYLIWLVDIYHKKPNQRGTNCPNVAWKKGCQEWEPEEFSGSKDELDFKFAIVDYKQLTKVGITVYKELSYSNDRLAEYRGKKGNHKVQFKYNPECMAVIWVLDEDMNEYFTVNAIDYEYASRVSLWQHKYNMKYQAELNSAEYDEDKEIDAEIKIEEIADRSIVKTNKIRARRRGARHQENSARAKSISNANPASIQKHEDEIVSADNDDWDIDYVGGSGGSGEASGSGRADALDDFDLDMLGSDALDDFDLDMLGSDALDDFDLDMLGSDALDDFDLDMLINSR

SEQ ID NO: 100 - DNA, 5921 bp, Artificial Sequence
  Synthetic
aacaaaccaccgctggtagcggtggtttttttgtttgcaagcagcagattacgcgcagaaaaaaaggatctcaagaagatcctttgatcttttctacggggtctgacgctcagtggaacgaaaactcacgttaagggattttggtcatgagattatcaaaaaggatcttcacctagatccttttaaattaaaaatgaagttttaaatcaatctaaagtatatatgagtaaacttggtctgacagttaccaatgcttaatcagtgaggcacctatctcagcgatctgtctatttcgttcatccatagttgcctgactccccgtcgtgtagataactacgatacgggagggcttaccatctggccccagtgctgcaatgataccgcgagacccacgctcaccggctccagatttatcagcaataaaccagccagccggaagggccgagcgcagaagtggtcctgcaactttatccgcctccatccagtctattaattgttgccgggaagctagagtaagtagttcgccagttaatagtttgcgcaacgttgttgccattgctacaggcatcgtggtgtcacgctcgtcgtttggtatggcttcattcagctccggttcccaacgatcaaggcgagttacatgatcccccatgttgtgcaaaaaagcggttagctccttcggtcctccgatcgttgtcagaagtaagttggccgcagtgttatcactcatggttatggcagcactgcataattctcttactgtcatgccatccgtaagatgcttttctgtgactggtgagtactcaaccaagtcattctgagaatagtgtatgcggcgaccgagttgctcttgcccggcgtcaatacgggataataccgcgccacatagcagaactttaaaagtgctcatcattggaaaacgttcttcggggcgaaaactctcaaggatcttaccgctgttgagatccagttcgatgtaacccactcgtgcacccaactgatcttcagcatcttttactttcaccagcgtttctgggtgagcaaaaacaggaaggcaaaatgccgcaaaaaagggaataagggcgacacggaaatgttgaatactcatactcttcctttttcaatattattgaagcatttatcagggttattgtctcatgagcggatacatatttgaatgtatttagaaaaataaacaaataggggttccgcgcacatttccccgaaaagtgccacctgacgtcgacggatcgggagatctcccgatcccctatggtgcactctcagtacaatctgctctgatgccgcatagttaagccagtatctgctccctgcttgtgtgttggaggtcgctgagtagtgcgcgagcaaaatttaagctacaacaaggcaaggcttgaccgacaattgcatgaagaatctgcttagggttaggcgttttgcgctgcttcgcgatgtacgggccagatatacgcgttgacattgattattgactagttattaatagtaatcaattacggggtcattagttcatagcccatatatggagttccgcgttacataacttacggtaaatggcccgcctggctgaccgcccaacgacccccgcccattgacgtcaataatgacgtatgttcccatagtaacgccaatagggactttccattgacgtcaatgggtggagtatttacggtaaactgcccacttggcagtacatcaagtgtatcatatgccaagtacgccccctattgacgtcaatgacggtaaatggcccgcctggcattatgcccagtacatgaccttatgggactttcctacttggcagtacatctacgtattagtcatcgctattaccatggtgatgcggttttggcagtacatcaatgggcgtggatagcggtttgactcacggggatttccaagtctccaccccattgacgtcaatgggagtttgttttggcaccaaaatcaacgggactttccaaaatgtcgtaacaactccgccccattgacgcaaatgggcggtaggcgtgtacggtgggaggtctatataagcagagctctctggctaactagagaacccactgcttactggcttatcgaaattaatacgactcactatagggagacccaagctggctagcgtgacctgccgcataggcagctaagaatggatccatggtgagcaagggcgaggagctgttcaccggggtggtgcccatcctggtcgagctggacggcgacgtaaacggccacaagttcagcgtgtccggcgagggcgagggcgatgccacctacggcaagctgaccctgaagttcatctgcaccaccggcaagctgcccgtgccctggcccaccctcgtgaccaccctgacctacggcgtgcagtgcttcagccgctaccccgaccacatgaagcagcacgacttcttcaagtccgccatgcccgaaggctacgtccaggagcgcaccatcttcttcaaggacgacggcaactacaagacccgcgccgaggtgaagttcgagggcgacaccctggtgaaccgcatcgagctgaagggcatcgacttcaaggaggacggcaacatcctggggcacaagctggagtacaactacaacagccacaacgtctatatcatggccgacaagcagaagaacggcatcaaggtgaacttcaagatccgccacaacatcgaggacggcagcgtgcagctcgccgaccactaccagcagaacacccccatcggcgacggccccgtgctgctgcccgacaaccactacctgagcacccagtccgccctgagcaaagaccccaacgagaagcgcgatcacatggtcctgctggagttcgtgaccgccgccgggatcactctcggcatggacgagctgtacaagaagcttagccatggcttcccgccggaggtggaggagcaggatgatggcacgctgcccatgtcttgtgcccaggagagcgggatggaccgtcaccctgcagcctgtgcttctgctaggatcaatgtgaagcgacctgccgccacaaagaaggctggacaggctaagaagaagaaatgagcggccgctcgagtctagagggcccgtttaaacccgctgatcagcctcgactgtgccttctagttgccagccatctgttgtttgcccctcccccgtgccttccttgaccctggaaggtgccactcccactgtcctttcctaataaaatgaggaaattgcatcgcattgtctgagtaggtgtcattctattctggggggtggggtggggcaggacagcaagggggaggattgggaagacaatagcaggcatgctggggatgcggtgggctctatggcttctgaggcggaaagaaccagctggggctctagggggtatccccacgcgccctgtagcggcgcattaagcgcggcgggtgtggtggttacgcgcagcgtgaccgctacacttgccagcgccctagcgcccgctcctttcgctttcttcccttcctttctcgccacgttcgccggctttccccgtcaagctctaaatcgggggctccctttagggttccgatttagtgctttacggcacctcgaccccaaaaaacttgattagggtgatggttcacgtacctagaagttcctattccgaagttcctattctctagaaagtataggaacttccttggccaaaaagcctgaactcaccgcgacgtctgtcgagaagtttctgatcgaaaagttcgacagcgtctccgacctgatgcagctctcggagggcgaagaatctcgtgctttcagcttcgatgtaggagggcgtggatatgtcctgcgggtaaatagctgcgccgatggtttctacaaagatcgttatgtttatcggcactttgcatcggccgcgctcccgattccggaagtgcttgacattggggaattcagcgagagcctgacctattgcatctcccgccgtgcacagggtgtcacgttgcaagacctgcctgaaaccgaactgcccgctgttctgcagccggtcgcggaggccatggatgcgatcgctgcggccgatcttagccagacgagcgggttcggcccattcggaccgcaaggaatcggtcaatacactacatggcgtgatttcatatgcgcgattgctgatccccatgtgtatcactggcaaactgtgatggacgacaccgtcagtgcgtccgtcgcgcaggctctcgatgagctgatgctttgggccgaggactgccccgaagtccggcacctcgtgcacgcggatttcggctccaacaatgtcctgacggacaatggccgcataacagcggtcattgactggagcgaggcgatgttcggggattcccaatacgaggtcgccaacatcttcttctggaggccgtggttggcttgtatggagcagcagacgcgctacttcgagcggaggcatccggagcttgcaggatcgccgcggctccgggcgtatatgctccgcattggtcttgaccaactctatcagagcttggttgacggcaatttcgatgatgcagcttgggcgcagggtcgatgcgacgcaatcgtccgatccggagccgggactgtcgggcgtacacaaatcgcccgcagaagcgcggccgtctggaccgatggctgtgtagaagtactcgccgatagtggaaaccgacgccccagcactcgtccgagggcaaaggaatagcacgtactacgagatttcgattccaccgccgccttctatgaaaggttgggcttcggaatcgttttccgggacgccggctggatgatcctccagcgcggggatctcatgctggagttcttcgcccaccccaacttgtttattgcagcttataatggttacaaataaagcaatagcatcacaaatttcacaaataaagcatttttttcactgcattctagttgtggtttgtccaaactcatcaatgtatcttatcatgtctgtataccgtcgacctctagctagagcttggcgtaatcatggtcatagctgtttcctgtgtgaaattgttatccgctcacaattccacacaacatacgagccggaagcataaagtgtaaagcctggggtgcctaatgagtgagctaactcacattaattgcgttgcgctcactgcccgctttccagtcgggaaacctgtcgtgccagctgcattaatgaatcggccaacgcgcggggagaggcggtttgcgtattgggcgctcttccgcttcctcgctcactgactcgctgcgctcggtcgttcggctgcggcgagcggtatcagctcactcaaaggcggtaatacggttatccacagaatcaggggataacgcaggaaagaacatgtgagcaaaaggccagcaaaaggccaggaaccgtaaaaaggccgcgttgctggcgtttttccataggctccgcccccctgacgagcatcacaaaaatcgacgctcaagtcagaggtggcgaaacccgacaggactataaagataccaggcgtttccccctggaagctccctcgtgcgctctcctgttccgaccctgccgcttaccggatacctgtccgcctttctcccttcgggaagcgtggcgctttctcatagctcacgctgtaggtatctcagttcggtgtaggtcgttcgctccaagctgggctgtgtgcacgaaccccccgttcagcccgaccgctgcgccttatccggtaactatcgtcttgagtccaacccggtaagacacgacttatcgccactggcagcagccactggtaacaggattagcagagcgaggtatgtaggcggtgctacagagttcttgaagtggtggcctaactacggctacactagaaggacagtatttggtatctgcgctctgctgaagccagttaccttcggaaaaagagttggtagctcttgatccggca

SEQ ID NO: 101 - DNA, 5921 bp, Artificial Sequence
  Synthetic
cttcggaaaaagagttggtagctcttgatccggcaaacaaaccaccgctggtagcggtggtttttttgtttgcaagcagcagattacgcgcagaaaaaaaggatctcaagaagatcctttgatcttttctacggggtctgacgctcagtggaacgaaaactcacgttaagggattttggtcatgagattatcaaaaaggatcttcacctagatccttttaaattaaaaatgaagttttaaatcaatctaaagtatatatgagtaaacttggtctgacagttaccaatgcttaatcagtgaggcacctatctcagcgatctgtctatttcgttcatccatagttgcctgactccccgtcgtgtagataactacgatacgggagggcttaccatctggccccagtgctgcaatgataccgcgagacccacgctcaccggctccagatttatcagcaataaaccagccagccggaagggccgagcgcagaagtggtcctgcaactttatccgcctccatccagtctattaattgttgccgggaagctagagtaagtagttcgccagttaatagtttgcgcaacgttgttgccattgctacaggcatcgtggtgtcacgctcgtcgtttggtatggcttcattcagctccggttcccaacgatcaaggcgagttacatgatcccccatgttgtgcaaaaaagcggttagctccttcggtcctccgatcgttgtcagaagtaagttggccgcagtgttatcactcatggttatggcagcactgcataattctcttactgtcatgccatccgtaagatgcttttctgtgactggtgagtactcaaccaagtcattctgagaatagtgtatgcggcgaccgagttgctcttgcccggcgtcaatacgggataataccgcgccacatagcagaactttaaaagtgctcatcattggaaaacgttcttcggggcgaaaactctcaaggatcttaccgctgttgagatccagttcgatgtaacccactcgtgcacccaactgatcttcagcatcttttactttcaccagcgtttctgggtgagcaaaaacaggaaggcaaaatgccgcaaaaaagggaataagggcgacacggaaatgttgaatactcatactcttcctttttcaatattattgaagcatttatcagggttattgtctcatgagcggatacatatttgaatgtatttagaaaaataaacaaataggggttccgcgcacatttccccgaaaagtgccacctgacgtcgacggatcgggagatctcccgatcccctatggtgcactctcagtacaatctgctctgatgccgcatagttaagccagtatctgctccctgcttgtgtgttggaggtcgctgagtagtgcgcgagcaaaatttaagctacaacaaggcaaggcttgaccgacaattgcatgaagaatctgcttagggttaggcgttttgcgctgcttcgcgatgtacgggccagatatacgcgttgacattgattattgactagttattaatagtaatcaattacggggtcattagttcatagcccatatatggagttccgcgttacataacttacggtaaatggcccgcctggctgaccgcccaacgacccccgcccattgacgtcaataatgacgtatgttcccatagtaacgccaatagggactttccattgacgtcaatgggtggagtatttacggtaaactgcccacttggcagtacatcaagtgtatcatatgccaagtacgccccctattgacgtcaatgacggtaaatggcccgcctggcattatgcccagtacatgaccttatgggactttcctacttggcagtacatctacgtattagtcatcgctattaccatggtgatgcggttttggcagtacatcaatgggcgtggatagcggtttgactcacggggatttccaagtctccaccccattgacgtcaatgggagtttgttttggcaccaaaatcaacgggactttccaaaatgtcgtaacaactccgccccattgacgcaaatgggcggtaggcgtgtacggtgggaggtctatataagcagagctctctggctaactagagaacccactgcttactggcttatcgaaattaatacgactcactatagggagacccaagctggctagcgtgaactgccgaataggtagctgataatggatccatggtgagcaagggcgaggagctgttcaccggggtggtgcccatcctggtcgagctggacggcgacgtaaacggccacaagttcagcgtgtccggcgagggcgagggcgatgccacctacggcaagctgaccctgaagttcatctgcaccaccggcaagctgcccgtgccctggcccaccctcgtgaccaccctgacctacggcgtgcagtgcttcagccgctaccccgaccacatgaagcagcacgacttcttcaagtccgccatgcccgaaggctacgtccaggagcgcaccatcttcttcaaggacgacggcaactacaagacccgcgccgaggtgaagttcgagggcgacaccctggtgaaccgcatcgagctgaagggcatcgacttcaaggaggacggcaacatcctggggcacaagctggagtacaactacaacagccacaacgtctatatcatggccgacaagcagaagaacggcatcaaggtgaacttcaagatccgccacaacatcgaggacggcagcgtgcagctcgccgaccactaccagcagaacacccccatcggcgacggccccgtgctgctgcccgacaaccactacctgagcacccagtccgccctgagcaaagaccccaacgagaagcgcgatcacatggtcctgctggagttcgtgaccgccgccgggatcactctcggcatggacgagctgtacaagaagcttagccatggcttcccgccggaggtggaggagcaggatgatggcacgctgcccatgtcttgtgcccaggagagcgggatggaccgtcaccctgcagcctgtgcttctgctaggatcaatgtgaagcgacctgccgccacaaagaaggctggacaggctaagaagaagaaatgagcggccgctcgagtctagagggcccgtttaaacccgctgatcagcctcgactgtgccttctagttgccagccatctgttgtttgcccctcccccgtgccttccttgaccctggaaggtgccactcccactgtcctttcctaataaaatgaggaaattgcatcgcattgtctgagtaggtgtcattctattctggggggtggggtggggcaggacagcaagggggaggattgggaagacaatagcaggcatgctggggatgcggtgggctctatggcttctgaggcggaaagaaccagctggggctctagggggtatccccacgcgccctgtagcggcgcattaagcgcggcgggtgtggtggttacgcgcagcgtgaccgctacacttgccagcgccctagcgcccgctcctttcgctttcttcccttcctttctcgccacgttcgccggctttccccgtcaagctctaaatcgggggctccctttagggttccgatttagtgctttacggcacctcgaccccaaaaaacttgattagggtgatggttcacgtacctagaagttcctattccgaagttcctattctctagaaagtataggaacttccttggccaaaaagcctgaactcaccgcgacgtctgtcgagaagtttctgatcgaaaagttcgacagcgtctccgacctgatgcagctctcggagggcgaagaatctcgtgctttcagcttcgatgtaggagggcgtggatatgtcctgcgggtaaatagctgcgccgatggtttctacaaagatcgttatgtttatcggcactttgcatcggccgcgctcccgattccggaagtgcttgacattggggaattcagcgagagcctgacctattgcatctcccgccgtgcacagggtgtcacgttgcaagacctgcctgaaaccgaactgcccgctgttctgcagccggtcgcggaggccatggatgcgatcgctgcggccgatcttagccagacgagcgggttcggcccattcggaccgcaaggaatcggtcaatacactacatggcgtgatttcatatgcgcgattgctgatccccatgtgtatcactggcaaactgtgatggacgacaccgtcagtgcgtccgtcgcgcaggctctcgatgagctgatgctttgggccgaggactgccccgaagtccggcacctcgtgcacgcggatttcggctccaacaatgtcctgacggacaatggccgcataacagcggtcattgactggagcgaggcgatgttcggggattcccaatacgaggtcgccaacatcttcttctggaggccgtggttggcttgtatggagcagcagacgcgctacttcgagcggaggcatccggagcttgcaggatcgccgcggctccgggcgtatatgctccgcattggtcttgaccaactctatcagagcttggttgacggcaatttcgatgatgcagcttgggcgcagggtcgatgcgacgcaatcgtccgatccggagccgggactgtcgggcgtacacaaatcgcccgcagaagcgcggccgtctggaccgatggctgtgtagaagtactcgccgatagtggaaaccgacgccccagcactcgtccgagggcaaaggaatagcacgtactacgagatttcgattccaccgccgccttctatgaaaggttgggcttcggaatcgttttccgggacgccggctggatgatcctccagcgcggggatctcatgctggagttcttcgcccaccccaacttgtttattgcagcttataatggttacaaataaagcaatagcatcacaaatttcacaaataaagcatttttttcactgcattctagttgtggtttgtccaaactcatcaatgtatcttatcatgtctgtataccgtcgacctctagctagagcttggcgtaatcatggtcatagctgtttcctgtgtgaaattgttatccgctcacaattccacacaacatacgagccggaagcataaagtgtaaagcctggggtgcctaatgagtgagctaactcacattaattgcgttgcgctcactgcccgctttccagtcgggaaacctgtcgtgccagctgcattaatgaatcggccaacgcgcggggagaggcggtttgcgtattgggcgctcttccgcttcctcgctcactgactcgctgcgctcggtcgttcggctgcggcgagcggtatcagctcactcaaaggcggtaatacggttatccacagaatcaggggataacgcaggaaagaacatgtgagcaaaaggccagcaaaaggccaggaaccgtaaaaaggccgcgttgctggcgtttttccataggctccgcccccctgacgagcatcacaaaaatcgacgctcaagtcagaggtggcgaaacccgacaggactataaagataccaggcgtttccccctggaagctccctcgtgcgctctcctgttccgaccctgccgcttaccggatacctgtccgcctttctcccttcgggaagcgtggcgctttctcatagctcacgctgtaggtatctcagttcggtgtaggtcgttcgctccaagctgggctgtgtgcacgaaccccccgttcagcccgaccgctgcgccttatccggtaactatcgtcttgagtccaacccggtaagacacgacttatcgccactggcagcagccactggtaacaggattagcagagcgaggtatgtaggcggtgctacagagttcttgaagtggtggcctaactacggctacactagaaggacagtatttggtatctgcgctctgctgaagccagttac

SEQ ID NO: 102 - DNA, 5921 bp, Artificial Sequence
  Synthetic
cttcggaaaaagagttggtagctcttgatccggcaaacaaaccaccgctggtagcggtggtttttttgtttgcaagcagcagattacgcgcagaaaaaaaggatctcaagaagatcctttgatcttttctacggggtctgacgctcagtggaacgaaaactcacgttaagggattttggtcatgagattatcaaaaaggatcttcacctagatccttttaaattaaaaatgaagttttaaatcaatctaaagtatatatgagtaaacttggtctgacagttaccaatgcttaatcagtgaggcacctatctcagcgatctgtctatttcgttcatccatagttgcctgactccccgtcgtgtagataactacgatacgggagggcttaccatctggccccagtgctgcaatgataccgcgagacccacgctcaccggctccagatttatcagcaataaaccagccagccggaagggccgagcgcagaagtggtcctgcaactttatccgcctccatccagtctattaattgttgccgggaagctagagtaagtagttcgccagttaatagtttgcgcaacgttgttgccattgctacaggcatcgtggtgtcacgctcgtcgtttggtatggcttcattcagctccggttcccaacgatcaaggcgagttacatgatcccccatgttgtgcaaaaaagcggttagctccttcggtcctccgatcgttgtcagaagtaagttggccgcagtgttatcactcatggttatggcagcactgcataattctcttactgtcatgccatccgtaagatgcttttctgtgactggtgagtactcaaccaagtcattctgagaatagtgtatgcggcgaccgagttgctcttgcccggcgtcaatacgggataataccgcgccacatagcagaactttaaaagtgctcatcattggaaaacgttcttcggggcgaaaactctcaaggatcttaccgctgttgagatccagttcgatgtaacccactcgtgcacccaactgatcttcagcatcttttactttcaccagcgtttctgggtgagcaaaaacaggaaggcaaaatgccgcaaaaaagggaataagggcgacacggaaatgttgaatactcatactcttcctttttcaatattattgaagcatttatcagggttattgtctcatgagcggatacatatttgaatgtatttagaaaaataaacaaataggggttccgcgcacatttccccgaaaagtgccacctgacgtcgacggatcgggagatctcccgatcccctatggtgcactctcagtacaatctgctctgatgccgcatagttaagccagtatctgctccctgcttgtgtgttggaggtcgctgagtagtgcgcgagcaaaatttaagctacaacaaggcaaggcttgaccgacaattgcatgaagaatctgcttagggttaggcgttttgcgctgcttcgcgatgtacgggccagatatacgcgttgacattgattattgactagttattaatagtaatcaattacggggtcattagttcatagcccatatatggagttccgcgttacataacttacggtaaatggcccgcctggctgaccgcccaacgacccccgcccattgacgtcaataatgacgtatgttcccatagtaacgccaatagggactttccattgacgtcaatgggtggagtatttacggtaaactgcccacttggcagtacatcaagtgtatcatatgccaagtacgccccctattgacgtcaatgacggtaaatggcccgcctggcattatgcccagtacatgaccttatgggactttcctacttggcagtacatctacgtattagtcatcgctattaccatggtgatgcggttttggcagtacatcaatgggcgtggatagcggtttgactcacggggatttccaagtctccaccccattgacgtcaatgggagtttgttttggcaccaaaatcaacgggactttccaaaatgtcgtaacaactccgccccattgacgcaaatgggcggtaggcgtgtacggtgggaggtctatataagcagagctctctggctaactagagaacccactgcttactggcttatcgaaattaatacgactcactatagggagacccaagctggctagcgtgttctgccgaataggcagccaagaaaggatccatggtgagcaagggcgaggagctgttcaccggggtggtgcccatcctggtcgagctggacggcgacgtaaacggccacaagttcagcgtgtccggcgagggcgagggcgatgccacctacggcaagctgaccctgaagttcatctgcaccaccggcaagctgcccgtgccctggcccaccctcgtgaccaccctgacctacggcgtgcagtgcttcagccgctaccccgaccacatgaagcagcacgacttcttcaagtccgccatgcccgaaggctacgtccaggagcgcaccatcttcttcaaggacgacggcaactacaagacccgcgccgaggtgaagttcgagggcgacaccctggtgaaccgcatcgagctgaagggcatcgacttcaaggaggacggcaacatcctggggcacaagctggagtacaactacaacagccacaacgtctatatcatggccgacaagcagaagaacggcatcaaggtgaacttcaagatccgccacaacatcgaggacggcagcgtgcagctcgccgaccactaccagcagaacacccccatcggcgacggccccgtgctgctgcccgacaaccactacctgagcacccagtccgccctgagcaaagaccccaacgagaagcgcgatcacatggtcctgctggagttcgtgaccgccgccgggatcactctcggcatggacgagctgtacaagaagcttagccatggcttcccgccggaggtggaggagcaggatgatggcacgctgcccatgtcttgtgcccaggagagcgggatggaccgtcaccctgcagcctgtgcttctgctaggatcaatgtgaagcgacctgccgccacaaagaaggctggacaggctaagaagaagaaatgagcggccgctcgagtctagagggcccgtttaaacccgctgatcagcctcgactgtgccttctagttgccagccatctgttgtttgcccctcccccgtgccttccttgaccctggaaggtgccactcccactgtcctttcctaataaaatgaggaaattgcatcgcattgtctgagtaggtgtcattctattctggggggtggggtggggcaggacagcaagggggaggattgggaagacaatagcaggcatgctggggatgcggtgggctctatggcttctgaggcggaaagaaccagctggggctctagggggtatccccacgcgccctgtagcggcgcattaagcgcggcgggtgtggtggttacgcgcagcgtgaccgctacacttgccagcgccctagcgcccgctcctttcgctttcttcccttcctttctcgccacgttcgccggctttccccgtcaagctctaaatcgggggctccctttagggttccgatttagtgctttacggcacctcgaccccaaaaaacttgattagggtgatggttcacgtacctagaagttcctattccgaagttcctattctctagaaagtataggaacttccttggccaaaaagcctgaactcaccgcgacgtctgtcgagaagtttctgatcgaaaagttcgacagcgtctccgacctgatgcagctctcggagggcgaagaatctcgtgctttcagcttcgatgtaggagggcgtggatatgtcctgcgggtaaatagctgcgccgatggtttctacaaagatcgttatgtttatcggcactttgcatcggccgcgctcccgattccggaagtgcttgacattggggaattcagcgagagcctgacctattgcatctcccgccgtgcacagggtgtcacgttgcaagacctgcctgaaaccgaactgcccgctgttctgcagccggtcgcggaggccatggatgcgatcgctgcggccgatcttagccagacgagcgggttcggcccattcggaccgcaaggaatcggtcaatacactacatggcgtgatttcatatgcgcgattgctgatccccatgtgtatcactggcaaactgtgatggacgacaccgtcagtgcgtccgtcgcgcaggctctcgatgagctgatgctttgggccgaggactgccccgaagtccggcacctcgtgcacgcggatttcggctccaacaatgtcctgacggacaatggccgcataacagcggtcattgactggagcgaggcgatgttcggggattcccaatacgaggtcgccaacatcttcttctggaggccgtggttggcttgtatggagcagcagacgcgctacttcgagcggaggcatccggagcttgcaggatcgccgcggctccgggcgtatatgctccgcattggtcttgaccaactctatcagagcttggttgacggcaatttcgatgatgcagcttgggcgcagggtcgatgcgacgcaatcgtccgatccggagccgggactgtcgggcgtacacaaatcgcccgcagaagcgcggccgtctggaccgatggctgtgtagaagtactcgccgatagtggaaaccgacgccccagcactcgtccgagggcaaaggaatagcacgtactacgagatttcgattccaccgccgccttctatgaaaggttgggcttcggaatcgttttccgggacgccggctggatgatcctccagcgcggggatctcatgctggagttcttcgcccaccccaacttgtttattgcagcttataatggttacaaataaagcaatagcatcacaaatttcacaaataaagcatttttttcactgcattctagttgtggtttgtccaaactcatcaatgtatcttatcatgtctgtataccgtcgacctctagctagagcttggcgtaatcatggtcatagctgtttcctgtgtgaaattgttatccgctcacaattccacacaacatacgagccggaagcataaagtgtaaagcctggggtgcctaatgagtgagctaactcacattaattgcgttgcgctcactgcccgctttccagtcgggaaacctgtcgtgccagctgcattaatgaatcggccaacgcgcggggagaggcggtttgcgtattgggcgctcttccgcttcctcgctcactgactcgctgcgctcggtcgttcggctgcggcgagcggtatcagctcactcaaaggcggtaatacggttatccacagaatcaggggataacgcaggaaagaacatgtgagcaaaaggccagcaaaaggccaggaaccgtaaaaaggccgcgttgctggcgtttttccataggctccgcccccctgacgagcatcacaaaaatcgacgctcaagtcagaggtggcgaaacccgacaggactataaagataccaggcgtttccccctggaagctccctcgtgcgctctcctgttccgaccctgccgcttaccggatacctgtccgcctttctcccttcgggaagcgtggcgctttctcatagctcacgctgtaggtatctcagttcggtgtaggtcgttcgctccaagctgggctgtgtgcacgaaccccccgttcagcccgaccgctgcgccttatccggtaactatcgtcttgagtccaacccggtaagacacgacttatcgccactggcagcagccactggtaacaggattagcagagcgaggtatgtaggcggtgctacagagttcttgaagtggtggcctaactacggctacactagaaggacagtatttggtatctgcgctctgctgaagccagttac

SEQ ID NO: 103 - DNA, 5921 bp, Artificial Sequence
  Synthetic
cttcggaaaaagagttggtagctcttgatccggcaaacaaaccaccgctggtagcggtggtttttttgtttgcaagcagcagattacgcgcagaaaaaaaggatctcaagaagatcctttgatcttttctacggggtctgacgctcagtggaacgaaaactcacgttaagggattttggtcatgagattatcaaaaaggatcttcacctagatccttttaaattaaaaatgaagttttaaatcaatctaaagtatatatgagtaaacttggtctgacagttaccaatgcttaatcagtgaggcacctatctcagcgatctgtctatttcgttcatccatagttgcctgactccccgtcgtgtagataactacgatacgggagggcttaccatctggccccagtgctgcaatgataccgcgagacccacgctcaccggctccagatttatcagcaataaaccagccagccggaagggccgagcgcagaagtggtcctgcaactttatccgcctccatccagtctattaattgttgccgggaagctagagtaagtagttcgccagttaatagtttgcgcaacgttgttgccattgctacaggcatcgtggtgtcacgctcgtcgtttggtatggcttcattcagctccggttcccaacgatcaaggcgagttacatgatcccccatgttgtgcaaaaaagcggttagctccttcggtcctccgatcgttgtcagaagtaagttggccgcagtgttatcactcatggttatggcagcactgcataattctcttactgtcatgccatccgtaagatgcttttctgtgactggtgagtactcaaccaagtcattctgagaatagtgtatgcggcgaccgagttgctcttgcccggcgtcaatacgggataataccgcgccacatagcagaactttaaaagtgctcatcattggaaaacgttcttcggggcgaaaactctcaaggatcttaccgctgttgagatccagttcgatgtaacccactcgtgcacccaactgatcttcagcatcttttactttcaccagcgtttctgggtgagcaaaaacaggaaggcaaaatgccgcaaaaaagggaataagggcgacacggaaatgttgaatactcatactcttcctttttcaatattattgaagcatttatcagggttattgtctcatgagcggatacatatttgaatgtatttagaaaaataaacaaataggggttccgcgcacatttccccgaaaagtgccacctgacgtcgacggatcgggagatctcccgatcccctatggtgcactctcagtacaatctgctctgatgccgcatagttaagccagtatctgctccctgcttgtgtgttggaggtcgctgagtagtgcgcgagcaaaatttaagctacaacaaggcaaggcttgaccgacaattgcatgaagaatctgcttagggttaggcgttttgcgctgcttcgcgatgtacgggccagatatacgcgttgacattgattattgactagttattaatagtaatcaattacggggtcattagttcatagcccatatatggagttccgcgttacataacttacggtaaatggcccgcctggctgaccgcccaacgacccccgcccattgacgtcaataatgacgtatgttcccatagtaacgccaatagggactttccattgacgtcaatgggtggagtatttacggtaaactgcccacttggcagtacatcaagtgtatcatatgccaagtacgccccctattgacgtcaatgacggtaaatggcccgcctggcattatgcccagtacatgaccttatgggactttcctacttggcagtacatctacgtattagtcatcgctattaccatggtgatgcggttttggcagtacatcaatgggcgtggatagcggtttgactcacggggatttccaagtctccaccccattgacgtcaatgggagtttgttttggcaccaaaatcaacgggactttccaaaatgtcgtaacaactccgccccattgacgcaaatgggcggtaggcgtgtacggtgggaggtctatataagcagagctctctggctaactagagaacccactgcttactggcttatcgaaattaatacgactcactatagggagacccaagctggctagcgtgtcctgccgcataggcagctaagagaggatccatggtgagcaagggcgaggagctgttcaccggggtggtgcccatcctggtcgagctggacggcgacgtaaacggccacaagttcagcgtgtccggcgagggcgagggcgatgccacctacggcaagctgaccctgaagttcatctgcaccaccggcaagctgcccgtgccctggcccaccctcgtgaccaccctgacctacggcgtgcagtgcttcagccgctaccccgaccacatgaagcagcacgacttcttcaagtccgccatgcccgaaggctacgtccaggagcgcaccatcttcttcaaggacgacggcaactacaagacccgcgccgaggtgaagttcgagggcgacaccctggtgaaccgcatcgagctgaagggcatcgacttcaaggaggacggcaacatcctggggcacaagctggagtacaactacaacagccacaacgtctatatcatggccgacaagcagaagaacggcatcaaggtgaacttcaagatccgccacaacatcgaggacggcagcgtgcagctcgccgaccactaccagcagaacacccccatcggcgacggccccgtgctgctgcccgacaaccactacctgagcacccagtccgccctgagcaaagaccccaacgagaagcgcgatcacatggtcctgctggagttcgtgaccgccgccgggatcactctcggcatggacgagctgtacaagaagcttagccatggcttcccgccggaggtggaggagcaggatgatggcacgctgcccatgtcttgtgcccaggagagcgggatggaccgtcaccctgcagcctgtgcttctgctaggatcaatgtgaagcgacctgccgccacaaagaaggctggacaggctaagaagaagaaatgagcggccgctcgagtctagagggcccgtttaaacccgctgatcagcctcgactgtgccttctagttgccagccatctgttgtttgcccctcccccgtgccttccttgaccctggaaggtgccactcccactgtcctttcctaataaaatgaggaaattgcatcgcattgtctgagtaggtgtcattctattctggggggtggggtggggcaggacagcaagggggaggattgggaagacaatagcaggcatgctggggatgcggtgggctctatggcttctgaggcggaaagaaccagctggggctctagggggtatccccacgcgccctgtagcggcgcattaagcgcggcgggtgtggtggttacgcgcagcgtgaccgctacacttgccagcgccctagcgcccgctcctttcgctttcttcccttcctttctcgccacgttcgccggctttccccgtcaagctctaaatcgggggctccctttagggttccgatttagtgctttacggcacctcgaccccaaaaaacttgattagggtgatggttcacgtacctagaagttcctattccgaagttcctattctctagaaagtataggaacttccttggccaaaaagcctgaactcaccgcgacgtctgtcgagaagtttctgatcgaaaagttcgacagcgtctccgacctgatgcagctctcggagggcgaagaatctcgtgctttcagcttcgatgtaggagggcgtggatatgtcctgcgggtaaatagctgcgccgatggtttctacaaagatcgttatgtttatcggcactttgcatcggccgcgctcccgattccggaagtgcttgacattggggaattcagcgagagcctgacctattgcatctcccgccgtgcacagggtgtcacgttgcaagacctgcctgaaaccgaactgcccgctgttctgcagccggtcgcggaggccatggatgcgatcgctgcggccgatcttagccagacgagcgggttcggcccattcggaccgcaaggaatcggtcaatacactacatggcgtgatttcatatgcgcgattgctgatccccatgtgtatcactggcaaactgtgatggacgacaccgtcagtgcgtccgtcgcgcaggctctcgatgagctgatgctttgggccgaggactgccccgaagtccggcacctcgtgcacgcggatttcggctccaacaatgtcctgacggacaatggccgcataacagcggtcattgactggagcgaggcgatgttcggggattcccaatacgaggtcgccaacatcttcttctggaggccgtggttggcttgtatggagcagcagacgcgctacttcgagcggaggcatccggagcttgcaggatcgccgcggctccgggcgtatatgctccgcattggtcttgaccaactctatcagagcttggttgacggcaatttcgatgatgcagcttgggcgcagggtcgatgcgacgcaatcgtccgatccggagccgggactgtcgggcgtacacaaatcgcccgcagaagcgcggccgtctggaccgatggctgtgtagaagtactcgccgatagtggaaaccgacgccccagcactcgtccgagggcaaaggaatagcacgtactacgagatttcgattccaccgccgccttctatgaaaggttgggcttcggaatcgttttccgggacgccggctggatgatcctccagcgcggggatctcatgctggagttcttcgcccaccccaacttgtttattgcagcttataatggttacaaataaagcaatagcatcacaaatttcacaaataaagcatttttttcactgcattctagttgtggtttgtccaaactcatcaatgtatcttatcatgtctgtataccgtcgacctctagctagagcttggcgtaatcatggtcatagctgtttcctgtgtgaaattgttatccgctcacaattccacacaacatacgagccggaagcataaagtgtaaagcctggggtgcctaatgagtgagctaactcacattaattgcgttgcgctcactgcccgctttccagtcgggaaacctgtcgtgccagctgcattaatgaatcggccaacgcgcggggagaggcggtttgcgtattgggcgctcttccgcttcctcgctcactgactcgctgcgctcggtcgttcggctgcggcgagcggtatcagctcactcaaaggcggtaatacggttatccacagaatcaggggataacgcaggaaagaacatgtgagcaaaaggccagcaaaaggccaggaaccgtaaaaaggccgcgttgctggcgtttttccataggctccgcccccctgacgagcatcacaaaaatcgacgctcaagtcagaggtggcgaaacccgacaggactataaagataccaggcgtttccccctggaagctccctcgtgcgctctcctgttccgaccctgccgcttaccggatacctgtccgcctttctcccttcgggaagcgtggcgctttctcatagctcacgctgtaggtatctcagttcggtgtaggtcgttcgctccaagctgggctgtgtgcacgaaccccccgttcagcccgaccgctgcgccttatccggtaactatcgtcttgagtccaacccggtaagacacgacttatcgccactggcagcagccactggtaacaggattagcagagcgaggtatgtaggcggtgctacagagttcttgaagtggtggcctaactacggctacactagaaggacagtatttggtatctgcgctctgctgaagccagttac

SEQ ID NO: 104 - DNA, 5921 bp, Artificial Sequence
  Synthetic
cttcggaaaaagagttggtagctcttgatccggcaaacaaaccaccgctggtagcggtggtttttttgtttgcaagcagcagattacgcgcagaaaaaaaggatctcaagaagatcctttgatcttttctacggggtctgacgctcagtggaacgaaaactcacgttaagggattttggtcatgagattatcaaaaaggatcttcacctagatccttttaaattaaaaatgaagttttaaatcaatctaaagtatatatgagtaaacttggtctgacagttaccaatgcttaatcagtgaggcacctatctcagcgatctgtctatttcgttcatccatagttgcctgactccccgtcgtgtagataactacgatacgggagggcttaccatctggccccagtgctgcaatgataccgcgagacccacgctcaccggctccagatttatcagcaataaaccagccagccggaagggccgagcgcagaagtggtcctgcaactttatccgcctccatccagtctattaattgttgccgggaagctagagtaagtagttcgccagttaatagtttgcgcaacgttgttgccattgctacaggcatcgtggtgtcacgctcgtcgtttggtatggcttcattcagctccggttcccaacgatcaaggcgagttacatgatcccccatgttgtgcaaaaaagcggttagctccttcggtcctccgatcgttgtcagaagtaagttggccgcagtgttatcactcatggttatggcagcactgcataattctcttactgtcatgccatccgtaagatgcttttctgtgactggtgagtactcaaccaagtcattctgagaatagtgtatgcggcgaccgagttgctcttgcccggcgtcaatacgggataataccgcgccacatagcagaactttaaaagtgctcatcattggaaaacgttcttcggggcgaaaactctcaaggatcttaccgctgttgagatccagttcgatgtaacccactcgtgcacccaactgatcttcagcatcttttactttcaccagcgtttctgggtgagcaaaaacaggaaggcaaaatgccgcaaaaaagggaataagggcgacacggaaatgttgaatactcatactcttcctttttcaatattattgaagcatttatcagggttattgtctcatgagcggatacatatttgaatgtatttagaaaaataaacaaataggggttccgcgcacatttccccgaaaagtgccacctgacgtcgacggatcgggagatctcccgatcccctatggtgcactctcagtacaatctgctctgatgccgcatagttaagccagtatctgctccctgcttgtgtgttggaggtcgctgagtagtgcgcgagcaaaatttaagctacaacaaggcaaggcttgaccgacaattgcatgaagaatctgcttagggttaggcgttttgcgctgcttcgcgatgtacgggccagatatacgcgttgacattgattattgactagttattaatagtaatcaattacggggtcattagttcatagcccatatatggagttccgcgttacataacttacggtaaatggcccgcctggctgaccgcccaacgacccccgcccattgacgtcaataatgacgtatgttcccatagtaacgccaatagggactttccattgacgtcaatgggtggagtatttacggtaaactgcccacttggcagtacatcaagtgtatcatatgccaagtacgccccctattgacgtcaatgacggtaaatggcccgcctggcattatgcccagtacatgaccttatgggactttcctacttggcagtacatctacgtattagtcatcgctattaccatggtgatgcggttttggcagtacatcaatgggcgtggatagcggtttgactcacggggatttccaagtctccaccccattgacgtcaatgggagtttgttttggcaccaaaatcaacgggactttccaaaatgtcgtaacaactccgccccattgacgcaaatgggcggtaggcgtgtacggtgggaggtctatataagcagagctctctggctaactagagaacccactgcttactggcttatcgaaattaatacgactcactatagggagacccaagctggctagcgtaacctgccggataggcagccaagaatggatccatggtgagcaagggcgaggagctgttcaccggggtggtgcccatcctggtcgagctggacggcgacgtaaacggccacaagttcagcgtgtccggcgagggcgagggcgatgccacctacggcaagctgaccctgaagttcatctgcaccaccggcaagctgcccgtgccctggcccaccctcgtgaccaccctgacctacggcgtgcagtgcttcagccgctaccccgaccacatgaagcagcacgacttcttcaagtccgccatgcccgaaggctacgtccaggagcgcaccatcttcttcaaggacgacggcaactacaagacccgcgccgaggtgaagttcgagggcgacaccctggtgaaccgcatcgagctgaagggcatcgacttcaaggaggacggcaacatcctggggcacaagctggagtacaactacaacagccacaacgtctatatcatggccgacaagcagaagaacggcatcaaggtgaacttcaagatccgccacaacatcgaggacggcagcgtgcagctcgccgaccactaccagcagaacacccccatcggcgacggccccgtgctgctgcccgacaaccactacctgagcacccagtccgccctgagcaaagaccccaacgagaagcgcgatcacatggtcctgctggagttcgtgaccgccgccgggatcactctcggcatggacgagctgtacaagaagcttagccatggcttcccgccggaggtggaggagcaggatgatggcacgctgcccatgtcttgtgcccaggagagcgggatggaccgtcaccctgcagcctgtgcttctgctaggatcaatgtgaagcgacctgccgccacaaagaaggctggacaggctaagaagaagaaatgagcggccgctcgagtctagagggcccgtttaaacccgctgatcagcctcgactgtgccttctagttgccagccatctgttgtttgcccctcccccgtgccttccttgaccctggaaggtgccactcccactgtcctttcctaataaaatgaggaaattgcatcgcattgtctgagtaggtgtcattctattctggggggtggggtggggcaggacagcaagggggaggattgggaagacaatagcaggcatgctggggatgcggtgggctctatggcttctgaggcggaaagaaccagctggggctctagggggtatccccacgcgccctgtagcggcgcattaagcgcggcgggtgtggtggttacgcgcagcgtgaccgctacacttgccagcgccctagcgcccgctcctttcgctttcttcccttcctttctcgccacgttcgccggctttccccgtcaagctctaaatcgggggctccctttagggttccgatttagtgctttacggcacctcgaccccaaaaaacttgattagggtgatggttcacgtacctagaagttcctattccgaagttcctattctctagaaagtataggaacttccttggccaaaaagcctgaactcaccgcgacgtctgtcgagaagtttctgatcgaaaagttcgacagcgtctccgacctgatgcagctctcggagggcgaagaatctcgtgctttcagcttcgatgtaggagggcgtggatatgtcctgcgggtaaatagctgcgccgatggtttctacaaagatcgttatgtttatcggcactttgcatcggccgcgctcccgattccggaagtgcttgacattggggaattcagcgagagcctgacctattgcatctcccgccgtgcacagggtgtcacgttgcaagacctgcctgaaaccgaactgcccgctgttctgcagccggtcgcggaggccatggatgcgatcgctgcggccgatcttagccagacgagcgggttcggcccattcggaccgcaaggaatcggtcaatacactacatggcgtgatttcatatgcgcgattgctgatccccatgtgtatcactggcaaactgtgatggacgacaccgtcagtgcgtccgtcgcgcaggctctcgatgagctgatgctttgggccgaggactgccccgaagtccggcacctcgtgcacgcggatttcggctccaacaatgtcctgacggacaatggccgcataacagcggtcattgactggagcgaggcgatgttcggggattcccaatacgaggtcgccaacatcttcttctggaggccgtggttggcttgtatggagcagcagacgcgctacttcgagcggaggcatccggagcttgcaggatcgccgcggctccgggcgtatatgctccgcattggtcttgaccaactctatcagagcttggttgacggcaatttcgatgatgcagcttgggcgcagggtcgatgcgacgcaatcgtccgatccggagccgggactgtcgggcgtacacaaatcgcccgcagaagcgcggccgtctggaccgatggctgtgtagaagtactcgccgatagtggaaaccgacgccccagcactcgtccgagggcaaaggaatagcacgtactacgagatttcgattccaccgccgccttctatgaaaggttgggcttcggaatcgttttccgggacgccggctggatgatcctccagcgcggggatctcatgctggagttcttcgcccaccccaacttgtttattgcagcttataatggttacaaataaagcaatagcatcacaaatttcacaaataaagcatttttttcactgcattctagttgtggtttgtccaaactcatcaatgtatcttatcatgtctgtataccgtcgacctctagctagagcttggcgtaatcatggtcatagctgtttcctgtgtgaaattgttatccgctcacaattccacacaacatacgagccggaagcataaagtgtaaagcctggggtgcctaatgagtgagctaactcacattaattgcgttgcgctcactgcccgctttccagtcgggaaacctgtcgtgccagctgcattaatgaatcggccaacgcgcggggagaggcggtttgcgtattgggcgctcttccgcttcctcgctcactgactcgctgcgctcggtcgttcggctgcggcgagcggtatcagctcactcaaaggcggtaatacggttatccacagaatcaggggataacgcaggaaagaacatgtgagcaaaaggccagcaaaaggccaggaaccgtaaaaaggccgcgttgctggcgtttttccataggctccgcccccctgacgagcatcacaaaaatcgacgctcaagtcagaggtggcgaaacccgacaggactataaagataccaggcgtttccccctggaagctccctcgtgcgctctcctgttccgaccctgccgcttaccggatacctgtccgcctttctcccttcgggaagcgtggcgctttctcatagctcacgctgtaggtatctcagttcggtgtaggtcgttcgctccaagctgggctgtgtgcacgaaccccccgttcagcccgaccgctgcgccttatccggtaactatcgtcttgagtccaacccggtaagacacgacttatcgccactggcagcagccactggtaacaggattagcagagcgaggtatgtaggcggtgctacagagttcttgaagtggtggcctaactacggctacactagaaggacagtatttggtatctgcgctctgctgaagccagttac

SEQ ID NO: 105 - DNA, 5921 bp, Artificial Sequence
  Synthetic
cttcggaaaaagagttggtagctcttgatccggcaaacaaaccaccgctggtagcggtggtttttttgtttgcaagcagcagattacgcgcagaaaaaaaggatctcaagaagatcctttgatcttttctacggggtctgacgctcagtggaacgaaaactcacgttaagggattttggtcatgagattatcaaaaaggatcttcacctagatccttttaaattaaaaatgaagttttaaatcaatctaaagtatatatgagtaaacttggtctgacagttaccaatgcttaatcagtgaggcacctatctcagcgatctgtctatttcgttcatccatagttgcctgactccccgtcgtgtagataactacgatacgggagggcttaccatctggccccagtgctgcaatgataccgcgagacccacgctcaccggctccagatttatcagcaataaaccagccagccggaagggccgagcgcagaagtggtcctgcaactttatccgcctccatccagtctattaattgttgccgggaagctagagtaagtagttcgccagttaatagtttgcgcaacgttgttgccattgctacaggcatcgtggtgtcacgctcgtcgtttggtatggcttcattcagctccggttcccaacgatcaaggcgagttacatgatcccccatgttgtgcaaaaaagcggttagctccttcggtcctccgatcgttgtcagaagtaagttggccgcagtgttatcactcatggttatggcagcactgcataattctcttactgtcatgccatccgtaagatgcttttctgtgactggtgagtactcaaccaagtcattctgagaatagtgtatgcggcgaccgagttgctcttgcccggcgtcaatacgggataataccgcgccacatagcagaactttaaaagtgctcatcattggaaaacgttcttcggggcgaaaactctcaaggatcttaccgctgttgagatccagttcgatgtaacccactcgtgcacccaactgatcttcagcatcttttactttcaccagcgtttctgggtgagcaaaaacaggaaggcaaaatgccgcaaaaaagggaataagggcgacacggaaatgttgaatactcatactcttcctttttcaatattattgaagcatttatcagggttattgtctcatgagcggatacatatttgaatgtatttagaaaaataaacaaataggggttccgcgcacatttccccgaaaagtgccacctgacgtcgacggatcgggagatctcccgatcccctatggtgcactctcagtacaatctgctctgatgccgcatagttaagccagtatctgctccctgcttgtgtgttggaggtcgctgagtagtgcgcgagcaaaatttaagctacaacaaggcaaggcttgaccgacaattgcatgaagaatctgcttagggttaggcgttttgcgctgcttcgcgatgtacgggccagatatacgcgttgacattgattattgactagttattaatagtaatcaattacggggtcattagttcatagcccatatatggagttccgcgttacataacttacggtaaatggcccgcctggctgaccgcccaacgacccccgcccattgacgtcaataatgacgtatgttcccatagtaacgccaatagggactttccattgacgtcaatgggtggagtatttacggtaaactgcccacttggcagtacatcaagtgtatcatatgccaagtacgccccctattgacgtcaatgacggtaaatggcccgcctggcattatgcccagtacatgaccttatgggactttcctacttggcagtacatctacgtattagtcatcgctattaccatggtgatgcggttttggcagtacatcaatgggcgtggatagcggtttgactcacggggatttccaagtctccaccccattgacgtcaatgggagtttgttttggcaccaaaatcaacgggactttccaaaatgtcgtaacaactccgccccattgacgcaaatgggcggtaggcgtgtacggtgggaggtctatataagcagagctctctggctaactagagaacccactgcttactggcttatcgaaattaatacgactcactatagggagacccaagctggctagcgtgacctgccgtataggcagctgaaaatggatccatggtgagcaagggcgaggagctgttcaccggggtggtgcccatcctggtcgagctggacggcgacgtaaacggccacaagttcagcgtgtccggcgagggcgagggcgatgccacctacggcaagctgaccctgaagttcatctgcaccaccggcaagctgcccgtgccctggcccaccctcgtgaccaccctgacctacggcgtgcagtgcttcagccgctaccccgaccacatgaagcagcacgacttcttcaagtccgccatgcccgaaggctacgtccaggagcgcaccatcttcttcaaggacgacggcaactacaagacccgcgccgaggtgaagttcgagggcgacaccctggtgaaccgcatcgagctgaagggcatcgacttcaaggaggacggcaacatcctggggcacaagctggagtacaactacaacagccacaacgtctatatcatggccgacaagcagaagaacggcatcaaggtgaacttcaagatccgccacaacatcgaggacggcagcgtgcagctcgccgaccactaccagcagaacacccccatcggcgacggccccgtgctgctgcccgacaaccactacctgagcacccagtccgccctgagcaaagaccccaacgagaagcgcgatcacatggtcctgctggagttcgtgaccgccgccgggatcactctcggcatggacgagctgtacaagaagcttagccatggcttcccgccggaggtggaggagcaggatgatggcacgctgcccatgtcttgtgcccaggagagcgggatggaccgtcaccctgcagcctgtgcttctgctaggatcaatgtgaagcgacctgccgccacaaagaaggctggacaggctaagaagaagaaatgagcggccgctcgagtctagagggcccgtttaaacccgctgatcagcctcgactgtgccttctagttgccagccatctgttgtttgcccctcccccgtgccttccttgaccctggaaggtgccactcccactgtcctttcctaataaaatgaggaaattgcatcgcattgtctgagtaggtgtcattctattctggggggtggggtggggcaggacagcaagggggaggattgggaagacaatagcaggcatgctggggatgcggtgggctctatggcttctgaggcggaaagaaccagctggggctctagggggtatccccacgcgccctgtagcggcgcattaagcgcggcgggtgtggtggttacgcgcagcgtgaccgctacacttgccagcgccctagcgcccgctcctttcgctttcttcccttcctttctcgccacgttcgccggctttccccgtcaagctctaaatcgggggctccctttagggttccgatttagtgctttacggcacctcgaccccaaaaaacttgattagggtgatggttcacgtacctagaagttcctattccgaagttcctattctctagaaagtataggaacttccttggccaaaaagcctgaactcaccgcgacgtctgtcgagaagtttctgatcgaaaagttcgacagcgtctccgacctgatgcagctctcggagggcgaagaatctcgtgctttcagcttcgatgtaggagggcgtggatatgtcctgcgggtaaatagctgcgccgatggtttctacaaagatcgttatgtttatcggcactttgcatcggccgcgctcccgattccggaagtgcttgacattggggaattcagcgagagcctgacctattgcatctcccgccgtgcacagggtgtcacgttgcaagacctgcctgaaaccgaactgcccgctgttctgcagccggtcgcggaggccatggatgcgatcgctgcggccgatcttagccagacgagcgggttcggcccattcggaccgcaaggaatcggtcaatacactacatggcgtgatttcatatgcgcgattgctgatccccatgtgtatcactggcaaactgtgatggacgacaccgtcagtgcgtccgtcgcgcaggctctcgatgagctgatgctttgggccgaggactgccccgaagtccggcacctcgtgcacgcggatttcggctccaacaatgtcctgacggacaatggccgcataacagcggtcattgactggagcgaggcgatgttcggggattcccaatacgaggtcgccaacatcttcttctggaggccgtggttggcttgtatggagcagcagacgcgctacttcgagcggaggcatccggagcttgcaggatcgccgcggctccgggcgtatatgctccgcattggtcttgaccaactctatcagagcttggttgacggcaatttcgatgatgcagcttgggcgcagggtcgatgcgacgcaatcgtccgatccggagccgggactgtcgggcgtacacaaatcgcccgcagaagcgcggccgtctggaccgatggctgtgtagaagtactcgccgatagtggaaaccgacgccccagcactcgtccgagggcaaaggaatagcacgtactacgagatttcgattccaccgccgccttctatgaaaggttgggcttcggaatcgttttccgggacgccggctggatgatcctccagcgcggggatctcatgctggagttcttcgcccaccccaacttgtttattgcagcttataatggttacaaataaagcaatagcatcacaaatttcacaaataaagcatttttttcactgcattctagttgtggtttgtccaaactcatcaatgtatcttatcatgtctgtataccgtcgacctctagctagagcttggcgtaatcatggtcatagctgtttcctgtgtgaaattgttatccgctcacaattccacacaacatacgagccggaagcataaagtgtaaagcctggggtgcctaatgagtgagctaactcacattaattgcgttgcgctcactgcccgctttccagtcgggaaacctgtcgtgccagctgcattaatgaatcggccaacgcgcggggagaggcggtttgcgtattgggcgctcttccgcttcctcgctcactgactcgctgcgctcggtcgttcggctgcggcgagcggtatcagctcactcaaaggcggtaatacggttatccacagaatcaggggataacgcaggaaagaacatgtgagcaaaaggccagcaaaaggccaggaaccgtaaaaaggccgcgttgctggcgtttttccataggctccgcccccctgacgagcatcacaaaaatcgacgctcaagtcagaggtggcgaaacccgacaggactataaagataccaggcgtttccccctggaagctccctcgtgcgctctcctgttccgaccctgccgcttaccggatacctgtccgcctttctcccttcgggaagcgtggcgctttctcatagctcacgctgtaggtatctcagttcggtgtaggtcgttcgctccaagctgggctgtgtgcacgaaccccccgttcagcccgaccgctgcgccttatccggtaactatcgtcttgagtccaacccggtaagacacgacttatcgccactggcagcagccactggtaacaggattagcagagcgaggtatgtaggcggtgctacagagttcttgaagtggtggcctaactacggctacactagaaggacagtatttggtatctgcgctctgctgaagccagttac

SEQ ID NO: 106 - DNA, 5921 bp, Artificial Sequence; identical to SEQ ID NO: 101
  Synthetic

SEQ ID NO: 107 - DNA, 5921 bp, Artificial Sequence
  Synthetic
cttcggaaaaagagttggtagctcttgatccggcaaacaaaccaccgctggtagcggtggtttttttgtttgcaagcagcagattacgcgcagaaaaaaaggatctcaagaagatcctttgatcttttctacggggtctgacgctcagtggaacgaaaactcacgttaagggattttggtcatgagattatcaaaaaggatcttcacctagatccttttaaattaaaaatgaagttttaaatcaatctaaagtatatatgagtaaacttggtctgacagttaccaatgcttaatcagtgaggcacctatctcagcgatctgtctatttcgttcatccatagttgcctgactccccgtcgtgtagataactacgatacgggagggcttaccatctggccccagtgctgcaatgataccgcgagacccacgctcaccggctccagatttatcagcaataaaccagccagccggaagggccgagcgcagaagtggtcctgcaactttatccgcctccatccagtctattaattgttgccgggaagctagagtaagtagttcgccagttaatagtttgcgcaacgttgttgccattgctacaggcatcgtggtgtcacgctcgtcgtttggtatggcttcattcagctccggttcccaacgatcaaggcgagttacatgatcccccatgttgtgcaaaaaagcggttagctccttcggtcctccgatcgttgtcagaagtaagttggccgcagtgttatcactcatggttatggcagcactgcataattctcttactgtcatgccatccgtaagatgcttttctgtgactggtgagtactcaaccaagtcattctgagaatagtgtatgcggcgaccgagttgctcttgcccggcgtcaatacgggataataccgcgccacatagcagaactttaaaagtgctcatcattggaaaacgttcttcggggcgaaaactctcaaggatcttaccgctgttgagatccagttcgatgtaacccactcgtgcacccaactgatcttcagcatcttttactttcaccagcgtttctgggtgagcaaaaacaggaaggcaaaatgccgcaaaaaagggaataagggcgacacggaaatgttgaatactcatactcttcctttttcaatattattgaagcatttatcagggttattgtctcatgagcggatacatatttgaatgtatttagaaaaataaacaaataggggttccgcgcacatttccccgaaaagtgccacctgacgtcgacggatcgggagatctcccgatcccctatggtgcactctcagtacaatctgctctgatgccgcatagttaagccagtatctgctccctgcttgtgtgttggaggtcgctgagtagtgcgcgagcaaaatttaagctacaacaaggcaaggcttgaccgacaattgcatgaagaatctgcttagggttaggcgttttgcgctgcttcgcgatgtacgggccagatatacgcgttgacattgattattgactagttattaatagtaatcaattacggggtcattagttcatagcccatatatggagttccgcgttacataacttacggtaaatggcccgcctggctgaccgcccaacgacccccgcccattgacgtcaataatgacgtatgttcccatagtaacgccaatagggactttccattgacgtcaatgggtggagtatttacggtaaactgcccacttggcagtacatcaagtgtatcatatgccaagtacgccccctattgacgtcaatgacggtaaatggcccgcctggcattatgcccagtacatgaccttatgggactttcctacttggcagtacatctacgtattagtcatcgctattaccatggtgatgcggttttggcagtacatcaatgggcgtggatagcggtttgactcacggggatttccaagtctccaccccattgacgtcaatgggagtttgttttggcaccaaaatcaacgggactttccaaaatgtcgtaacaactccgccccattgacgcaaatgggcggtaggcgtgtacggtgggaggtctatataagcagagctctctggctaactagagaacccactgcttactggcttatcgaaattaatacgactcactatagggagacccaagctggctagcgtgctccgccgaataggcagctaaaaagggatccatggtgagcaagggcgaggagctgttcaccggggtggtgcccatcctggtcgagctggacggcgacgtaaacggccacaagttcagcgtgtccggcgagggcgagggcgatgccacctacggcaagctgaccctgaagttcatctgcaccaccggcaagctgcccgtgccctggcccaccctcgtgaccaccctgacctacggcgtgcagtgcttcagccgctaccccgaccacatgaagcagcacgacttcttcaagtccgccatgcccgaaggctacgtccaggagcgcaccatcttcttcaaggacgacggcaactacaagacccgcgccgaggtgaagttcgagggcgacaccctggtgaaccgcatcgagctgaagggcatcgacttcaaggaggacggcaacatcctggggcacaagctggagtacaactacaacagccacaacgtctatatcatggccgacaagcagaagaacggcatcaaggtgaacttcaagatccgccacaacatcgaggacggcagcgtgcagctcgccgaccactaccagcagaacacccccatcggcgacggccccgtgctgctgcccgacaaccactacctgagcacccagtccgccctgagcaaagaccccaacgagaagcgcgatcacatggtcctgctggagttcgtgaccgccgccgggatcactctcggcatggacgagctgtacaagaagcttagccatggcttcccgccggaggtggaggagcaggatgatggcacgctgcccatgtcttgtgcccaggagagcgggatggaccgtcaccctgcagcctgtgcttctgctaggatcaatgtgaagcgacctgccgccacaaagaaggctggacaggctaagaagaagaaatgagcggccgctcgagtctagagggcccgtttaaacccgctgatcagcctcgactgtgccttctagttgccagccatctgttgtttgcccctcccccgtgccttccttgaccctggaaggtgccactcccactgtcctttcctaataaaatgaggaaattgcatcgcattgtctgagtaggtgtcattctattctggggggtggggtggggcaggacagcaagggggaggattgggaagacaatagcaggcatgctggggatgcggtgggctctatggcttctgaggcggaaagaaccagctggggctctagggggtatccccacgcgccctgtagcggcgcattaagcgcggcgggtgtggtggttacgcgcagcgtgaccgctacacttgccagcgccctagcgcccgctcctttcgctttcttcccttcctttctcgccacgttcgccggctttccccgtcaagctctaaatcgggggctccctttagggttccgatttagtgctttacggcacctcgaccccaaaaaacttgattagggtgatggttcacgtacctagaagttcctattccgaagttcctattctctagaaagtataggaacttccttggccaaaaagcctgaactcaccgcgacgtctgtcgagaagtttctgatcgaaaagttcgacagcgtctccgacctgatgcagctctcggagggcgaagaatctcgtgctttcagcttcgatgtaggagggcgtggatatgtcctgcgggtaaatagctgcgccgatggtttctacaaagatcgttatgtttatcggcactttgcatcggccgcgctcccgattccggaagtgcttgacattggggaattcagcgagagcctgacctattgcatctcccgccgtgcacagggtgtcacgttgcaagacctgcctgaaaccgaactgcccgctgttctgcagccggtcgcggaggccatggatgcgatcgctgcggccgatcttagccagacgagcgggttcggcccattcggaccgcaaggaatcggtcaatacactacatggcgtgatttcatatgcgcgattgctgatccccatgtgtatcactggcaaactgtgatggacgacaccgtcagtgcgtccgtcgcgcaggctctcgatgagctgatgctttgggccgaggactgccccgaagtccggcacctcgtgcacgcggatttcggctccaacaatgtcctgacggacaatggccgcataacagcggtcattgactggagcgaggcgatgttcggggattcccaatacgaggtcgccaacatcttcttctggaggccgtggttggcttgtatggagcagcagacgcgctacttcgagcggaggcatccggagcttgcaggatcgccgcggctccgggcgtatatgctccgcattggtcttgaccaactctatcagagcttggttgacggcaatttcgatgatgcagcttgggcgcagggtcgatgcgacgcaatcgtccgatccggagccgggactgtcgggcgtacacaaatcgcccgcagaagcgcggccgtctggaccgatggctgtgtagaagtactcgccgatagtggaaaccgacgccccagcactcgtccgagggcaaaggaatagcacgtactacgagatttcgattccaccgccgccttctatgaaaggttgggcttcggaatcgttttccgggacgccggctggatgatcctccagcgcggggatctcatgctggagttcttcgcccaccccaacttgtttattgcagcttataatggttacaaataaagcaatagcatcacaaatttcacaaataaagcatttttttcactgcattctagttgtggtttgtccaaactcatcaatgtatcttatcatgtctgtataccgtcgacctctagctagagcttggcgtaatcatggtcatagctgtttcctgtgtgaaattgttatccgctcacaattccacacaacatacgagccggaagcataaagtgtaaagcctggggtgcctaatgagtgagctaactcacattaattgcgttgcgctcactgcccgctttccagtcgggaaacctgtcgtgccagctgcattaatgaatcggccaacgcgcggggagaggcggtttgcgtattgggcgctcttccgcttcctcgctcactgactcgctgcgctcggtcgttcggctgcggcgagcggtatcagctcactcaaaggcggtaatacggttatccacagaatcaggggataacgcaggaaagaacatgtgagcaaaaggccagcaaaaggccaggaaccgtaaaaaggccgcgttgctggcgtttttccataggctccgcccccctgacgagcatcacaaaaatcgacgctcaagtcagaggtggcgaaacccgacaggactataaagataccaggcgtttccccctggaagctccctcgtgcgctctcctgttccgaccctgccgcttaccggatacctgtccgcctttctcccttcgggaagcgtggcgctttctcatagctcacgctgtaggtatctcagttcggtgtaggtcgttcgctccaagctgggctgtgtgcacgaaccccccgttcagcccgaccgctgcgccttatccggtaactatcgtcttgagtccaacccggtaagacacgacttatcgccactggcagcagccactggtaacaggattagcagagcgaggtatgtaggcggtgctacagagttcttgaagtggtggcctaactacggctacactagaaggacagtatttggtatctgcgctctgctgaagccagttac

SEQ ID NO: 108 - DNA, 5921 bp, Artificial Sequence
  Synthetic
cttcggaaaaagagttggtagctcttgatccggcaaacaaaccaccgctggtagcggtggtttttttgtttgcaagcagcagattacgcgcagaaaaaaaggatctcaagaagatcctttgatcttttctacggggtctgacgctcagtggaacgaaaactcacgttaagggattttggtcatgagattatcaaaaaggatcttcacctagatccttttaaattaaaaatgaagttttaaatcaatctaaagtatatatgagtaaacttggtctgacagttaccaatgcttaatcagtgaggcacctatctcagcgatctgtctatttcgttcatccatagttgcctgactccccgtcgtgtagataactacgatacgggagggcttaccatctggccccagtgctgcaatgataccgcgagacccacgctcaccggctccagatttatcagcaataaaccagccagccggaagggccgagcgcagaagtggtcctgcaactttatccgcctccatccagtctattaattgttgccgggaagctagagtaagtagttcgccagttaatagtttgcgcaacgttgttgccattgctacaggcatcgtggtgtcacgctcgtcgtttggtatggcttcattcagctccggttcccaacgatcaaggcgagttacatgatcccccatgttgtgcaaaaaagcggttagctccttcggtcctccgatcgttgtcagaagtaagttggccgcagtgttatcactcatggttatggcagcactgcataattctcttactgtcatgccatccgtaagatgcttttctgtgactggtgagtactcaaccaagtcattctgagaatagtgtatgcggcgaccgagttgctcttgcccggcgtcaatacgggataataccgcgccacatagcagaactttaaaagtgctcatcattggaaaacgttcttcggggcgaaaactctcaaggatcttaccgctgttgagatccagttcgatgtaacccactcgtgcacccaactgatcttcagcatcttttactttcaccagcgtttctgggtgagcaaaaacaggaaggcaaaatgccgcaaaaaagggaataagggcgacacggaaatgttgaatactcatactcttcctttttcaatattattgaagcatttatcagggttattgtctcatgagcggatacatatttgaatgtatttagaaaaataaacaaataggggttccgcgcacatttccccgaaaagtgccacctgacgtcgacggatcgggagatctcccgatcccctatggtgcactctcagtacaatctgctctgatgccgcatagttaagccagtatctgctccctgcttgtgtgttggaggtcgctgagtagtgcgcgagcaaaatttaagctacaacaaggcaaggcttgaccgacaattgcatgaagaatctgcttagggttaggcgttttgcgctgcttcgcgatgtacgggccagatatacgcgttgacattgattattgactagttattaatagtaatcaattacggggtcattagttcatagcccatatatggagttccgcgttacataacttacggtaaatggcccgcctggctgaccgcccaacgacccccgcccattgacgtcaataatgacgtatgttcccatagtaacgccaatagggactttccattgacgtcaatgggtggagtatttacggtaaactgcccacttggcagtacatcaagtgtatcatatgccaagtacgccccctattgacgtcaatgacggtaaatggcccgcctggcattatgcccagtacatgaccttatgggactttcctacttggcagtacatctacgtattagtcatcgctattaccatggtgatgcggttttggcagtacatcaatgggcgtggatagcggtttgactcacggggatttccaagtctccaccccattgacgtcaatgggagtttgttttggcaccaaaatcaacgggactttccaaaatgtcgtaacaactccgccccattgacgcaaatgggcggtaggcgtgtacggtgggaggtctatataagcagagctctctggctaactagagaacccactgcttactggcttatcgaaattaatacgactcactatagggagacccaagctggctagccctcactgccgcatacgcagctgaaaatggatccatggtgagcaagggcgaggagctgttcaccggggtggtgcccatcctggtcgagctggacggcgacgtaaacggccacaagttcagcgtgtccggcgagggcgagggcgatgccacctacggcaagctgaccctgaagttcatctgcaccaccggcaagctgcccgtgccctggcccaccctcgtgaccaccctgacctacggcgtgcagtgcttcagccgctaccccgaccacatgaagcagcacgacttcttcaagtccgccatgcccgaaggctacgtccaggagcgcaccatcttcttcaaggacgacggcaactacaagacccgcgccgaggtgaagttcgagggcgacaccctggtgaaccgcatcgagctgaagggcatcgacttcaaggaggacggcaacatcctggggcacaagctggagtacaactacaacagccacaacgtctatatcatggccgacaagcagaagaacggcatcaaggtgaacttcaagatccgccacaacatcgaggacggcagcgtgcagctcgccgaccactaccagcagaacacccccatcggcgacggccccgtgctgctgcccgacaaccactacctgagcacccagtccgccctgagcaaagaccccaacgagaagcgcgatcacatggtcctgctggagttcgtgaccgccgccgggatcactctcggcatggacgagctgtacaagaagcttagccatggcttcccgccggaggtggaggagcaggatgatggcacgctgcccatgtcttgtgcccaggagagcgggatggaccgtcaccctgcagcctgtgcttctgctaggatcaatgtgaagcgacctgccgccacaaagaaggctggacaggctaagaagaagaaatgagcggccgctcgagtctagagggcccgtttaaacccgctgatcagcctcgactgtgccttctagttgccagccatctgttgtttgcccctcccccgtgccttccttgaccctggaaggtgccactcccactgtcctttcctaataaaatgaggaaattgcatcgcattgtctgagtaggtgtcattctattctggggggtggggtggggcaggacagcaagggggaggattgggaagacaatagcaggcatgctggggatgcggtgggctctatggcttctgaggcggaaagaaccagctggggctctagggggtatccccacgcgccctgtagcggcgcattaagcgcggcgggtgtggtggttacgcgcagcgtgaccgctacacttgccagcgccctagcgcccgctcctttcgctttcttcccttcctttctcgccacgttcgccggctttccccgtcaagctctaaatcgggggctccctttagggttccgatttagtgctttacggcacctcgaccccaaaaaacttgattagggtgatggttcacgtacctagaagttcctattccgaagttcctattctctagaaagtataggaacttccttggccaaaaagcctgaactcaccgcgacgtctgtcgagaagtttctgatcgaaaagttcgacagcgtctccgacctgatgcagctctcggagggcgaagaatctcgtgctttcagcttcgatgtaggagggcgtggatatgtcctgcgggtaaatagctgcgccgatggtttctacaaagatcgttatgtttatcggcactttgcatcggccgcgctcccgattccggaagtgcttgacattggggaattcagcgagagcctgacctattgcatctcccgccgtgcacagggtgtcacgttgcaagacctgcctgaaaccgaactgcccgctgttctgcagccggtcgcggaggccatggatgcgatcgctgcggccgatcttagccagacgagcgggttcggcccattcggaccgcaaggaatcggtcaatacactacatggcgtgatttcatatgcgcgattgctgatccccatgtgtatcactggcaaactgtgatggacgacaccgtcagtgcgtccgtcgcgcaggctctcgatgagctgatgctttgggccgaggactgccccgaagtccggcacctcgtgcacgcggatttcggctccaacaatgtcctgacggacaatggccgcataacagcggtcattgactggagcgaggcgatgttcggggattcccaatacgaggtcgccaacatcttcttctggaggccgtggttggcttgtatggagcagcagacgcgctacttcgagcggaggcatccggagcttgcaggatcgccgcggctccgggcgtatatgctccgcattggtcttgaccaactctatcagagcttggttgacggcaatttcgatgatgcagcttgggcgcagggtcgatgcgacgcaatcgtccgatccggagccgggactgtcgggcgtacacaaatcgcccgcagaagcgcggccgtctggaccgatggctgtgtagaagtactcgccgatagtggaaaccgacgccccagcactcgtccgagggcaaaggaatagcacgtactacgagatttcgattccaccgccgccttctatgaaaggttgggcttcggaatcgttttccgggacgccggctggatgatcctccagcgcggggatctcatgctggagttcttcgcccaccccaacttgtttattgcagcttataatggttacaaataaagcaatagcatcacaaatttcacaaataaagcatttttttcactgcattctagttgtggtttgtccaaactcatcaatgtatcttatcatgtctgtataccgtcgacctctagctagagcttggcgtaatcatggtcatagctgtttcctgtgtgaaattgttatccgctcacaattccacacaacatacgagccggaagcataaagtgtaaagcctggggtgcctaatgagtgagctaactcacattaattgcgttgcgctcactgcccgctttccagtcgggaaacctgtcgtgccagctgcattaatgaatcggccaacgcgcggggagaggcggtttgcgtattgggcgctcttccgcttcctcgctcactgactcgctgcgctcggtcgttcggctgcggcgagcggtatcagctcactcaaaggcggtaatacggttatccacagaatcaggggataacgcaggaaagaacatgtgagcaaaaggccagcaaaaggccaggaaccgtaaaaaggccgcgttgctggcgtttttccataggctccgcccccctgacgagcatcacaaaaatcgacgctcaagtcagaggtggcgaaacccgacaggactataaagataccaggcgtttccccctggaagctccctcgtgcgctctcctgttccgaccctgccgcttaccggatacctgtccgcctttctcccttcgggaagcgtggcgctttctcatagctcacgctgtaggtatctcagttcggtgtaggtcgttcgctccaagctgggctgtgtgcacgaaccccccgttcagcccgaccgctgcgccttatccggtaactatcgtcttgagtccaacccggtaagacacgacttatcgccactggcagcagccactggtaacaggattagcagagcgaggtatgtaggcggtgctacagagttcttgaagtggtggcctaactacggctacactagaaggacagtatttggtatctgcgctctgctgaagccagttac

SEQ ID NO: 109 - DNA, 6084 bp, Artificial Sequence
  Synthetic
gacggatcgggagatctcccgatcccctatggtgcactctcagtacaatctgctctgatgccgcatagttaagccagtatctgctccctgcttgtgtgttggaggtcgctgagtagtgcgcgagcaaaatttaagctacaacaaggcaaggcttgaccgacaattgcatgaagaatctgcttagggttaggcgttttgcgctgcttcgcgatgtacgggccagatatacgcgttgacattgattattgactagttattaatagtaatcaattacggggtcattagttcatagcccatatatggagttccgcgttacataacttacggtaaatggcccgcctggctgaccgcccaacgacccccgcccattgacgtcaataatgacgtatgttcccatagtaacgccaatagggactttccattgacgtcaatgggtggagtatttacggtaaactgcccacttggcagtacatcaagtgtatcatatgccaagtacgccccctattgacgtcaatgacggtaaatggcccgcctggcattatgcccagtacatgaccttatgggactttcctacttggcagtacatctacgtattagtcatcgctattaccatggtgatgcggttttggcagtacatcaatgggcgtggatagcggtttgactcacggggatttccaagtctccaccccattgacgtcaatgggagtttgttttggcaccaaaatcaacgggactttccaaaatgtcgtaacaactccgccccattgacgcaaatgggcggtaggcgtgtacggtgggaggtctatataagcagagctctctggctaactagagaacccactgcttactggcttatcgaaattaatacgactcactatagggagacccaagctggctagcgtttaaacttaagcttggtaccgccaccatgggcccgaaaaagaagcgaaaagttgactacaaggaccacgatggtgattataaagatcatgacatcgactataaagacgatgatgacaagggatccggaatgctgaagagatactacttcaccatcacctacctgcctaagaattgcgacgtgtctctcctggctggcagatgtatcggcatcctgcacggctttatgagcagcagagaaatcagcaacatcggagtgtgcttccccaagtggaacgagcaggagattggaaatgaactggccttcgtttccaccgacaagaaacagctgaccaacctgtctcagcagagctactttgagatgatggcccaggacaagctgttcggcctgagcaagatcctggaagtgcctaccaaccagaacgaagtgatgttcatccggaaccagagcgtggccaaggctttcgtgggcgagaagcagcgcagactgaagcgggccaagaaaagagccgaggctagaggcgaagtctacaaccccgagtaccagttcgaggccaaagacatcggccacttccacagcatccctgtgtccagcaaggccaacggccagtcttatgtgctgcacatccagaagatcgagaacacaaacgccacagagaatcaatttaacaactacggcttcgccaccaatcaaacattccagggcacagtgccaagcctgaacacccagtgagcggccgctcgagtctagagggcccgtttaaacccgctgatcagcctcgactgtgccttctagttgccagccatctgttgtttgcccctcccccgtgccttccttgaccctggaaggtgccactcccactgtcctttcctaataaaatgaggaaattgcatcgcattgtctgagtaggtgtcattctattctggggggtggggtggggcaggacagcaagggggaggattgggaagacaatagcaggcatgctggggatgcggtgggctctatggcttctgaggcggaaagaaccagctggggctctagggggtatccccacgcgccctgtagcggcgcattaagcgcggcgggtgtggtggttacgcgcagcgtgaccgctacacttgccagcgccctagcgcccgctcctttcgctttcttcccttcctttctcgccacgttcgccggctttccccgtcaagctctaaatcgggggctccctttagggttccgatttagtgctttacggcacctcgaccccaaaaaacttgattagggtgatggttcacgtagtgggccatcgccctgatagacggtttttcgccctttgacgttggagtccacgttctttaatagtggactcttgttccaaactggaacaacactcaaccctatctcggtctattcttttgatttataagggattttgccgatttcggcctattggttaaaaaatgagctgatttaacaaaaatttaacgcgaattaattctgtggaatgtgtgtcagttagggtgtggaaagtccccaggctccccagcaggcagaagtatgcaaagcatgcatctcaattagtcagcaaccaggtgtggaaagtccccaggctccccagcaggcagaagtatgcaaagcatgcatctcaattagtcagcaaccatagtcccgcccctaactccgcccatcccgcccctaactccgcccagttccgcccattctccgccccatggctgactaattttttttatttatgcagaggccgaggccgcctctgcctctgagctattccagaagtagtgaggaggcttttttggaggcctaggcttttgcaaaaagctcccgggagcttgtatatccattttcggatctgatcaagagacaggatgaggatcgtttcgcatgattgaacaagatggattgcacgcaggttctccggccgcttgggtggagaggctattcggctatgactgggcacaacagacaatcggctgctctgatgccgccgtgttccggctgtcagcgcaggggcgcccggttctttttgtcaagaccgacctgtccggtgccctgaatgaactgcaggacgaggcagcgcggctatcgtggctggccacgacgggcgttccttgcgcagctgtgctcgacgttgtcactgaagcgggaagggactggctgctattgggcgaagtgccggggcaggatctcctgtcatctcaccttgctcctgccgagaaagtatccatcatggctgatgcaatgcggcggctgcatacgcttgatccggctacctgcccattcgaccaccaagcgaaacatcgcatcgagcgagcacgtactcggatggaagccggtcttgtcgatcaggatgatctggacgaagagcatcaggggctcgcgccagccgaactgttcgccaggctcaaggcgcgcatgcccgacggcgaggatctcgtcgtgacccatggcgatgcctgcttgccgaatatcatggtggaaaatggccgcttttctggattcatcgactgtggccggctgggtgtggcggaccgctatcaggacatagcgttggctacccgtgatattgctgaagagcttggcggcgaatgggctgaccgcttcctcgtgctttacggtatcgccgctcccgattcgcagcgcatcgccttctatcgccttcttgacgagttcttctgagcgggactctggggttcgaaatgaccgaccaagcgacgcccaacctgccatcacgagatttcgattccaccgccgccttctatgaaaggttgggcttcggaatcgttttccgggacgccggctggatgatcctccagcgcggggatctcatgctggagttcttcgcccaccccaacttgtttattgcagcttataatggttacaaataaagcaatagcatcacaaatttcacaaataaagcatttttttcactgcattctagttgtggtttgtccaaactcatcaatgtatcttatcatgtctgtataccgtcgacctctagctagagcttggcgtaatcatggtcatagctgtttcctgtgtgaaattgttatccgctcacaattccacacaacatacgagccggaagcataaagtgtaaagcctggggtgcctaatgagtgagctaactcacattaattgcgttgcgctcactgcccgctttccagtcgggaaacctgtcgtgccagctgcattaatgaatcggccaacgcgcggggagaggcggtttgcgtattgggcgctcttccgcttcctcgctcactgactcgctgcgctcggtcgttcggctgcggcgagcggtatcagctcactcaaaggcggtaatacggttatccacagaatcaggggataacgcaggaaagaacatgtgagcaaaaggccagcaaaaggccaggaaccgtaaaaaggccgcgttgctggcgtttttccataggctccgcccccctgacgagcatcacaaaaatcgacgctcaagtcagaggtggcgaaacccgacaggactataaagataccaggcgtttccccctggaagctccctcgtgcgctctcctgttccgaccctgccgcttaccggatacctgtccgcctttctcccttcgggaagcgtggcgctttctcatagctcacgctgtaggtatctcagttcggtgtaggtcgttcgctccaagctgggctgtgtgcacgaaccccccgttcagcccgaccgctgcgccttatccggtaactatcgtcttgagtccaacccggtaagacacgacttatcgccactggcagcagccactggtaacaggattagcagagcgaggtatgtaggcggtgctacagagttcttgaagtggtggcctaactacggctacactagaagaacagtatttggtatctgcgctctgctgaagccagttaccttcggaaaaagagttggtagctcttgatccggcaaacaaaccaccgctggtagcggtttttttgtttgcaagcagcagattacgcgcagaaaaaaaggatctcaagaagatcctttgatcttttctacggggtctgacgctcagtggaacgaaaactcacgttaagggattttggtcatgagattatcaaaaaggatcttcacctagatccttttaaattaaaaatgaagttttaaatcaatctaaagtatatatgagtaaacttggtctgacagttaccaatgcttaatcagtgaggcacctatctcagcgatctgtctatttcgttcatccatagttgcctgactccccgtcgtgtagataactacgatacgggagggcttaccatctggccccagtgctgcaatgataccgcgagacccacgctcaccggctccagatttatcagcaataaaccagccagccggaagggccgagcgcagaagtggtcctgcaactttatccgcctccatccagtctattaattgttgccgggaagctagagtaagtagttcgccagttaatagtttgcgcaacgttgttgccattgctacaggcatcgtggtgtcacgctcgtcgtttggtatggcttcattcagctccggttcccaacgatcaaggcgagttacatgatcccccatgttgtgcaaaaaagcggttagctccttcggtcctccgatcgttgtcagaagtaagttggccgcagtgttatcactcatggttatggcagcactgcataattctcttactgtcatgccatccgtaagatgcttttctgtgactggtgagtactcaaccaagtcattctgagaatagtgtatgcggcgaccgagttgctcttgcccggcgtcaatacgggataataccgcgccacatagcagaactttaaaagtgctcatcattggaaaacgttcttcggggcgaaaactctcaaggatcttaccgctgttgagatccagttcgatgtaacccactcgtgcacccaactgatcttcagcatcttttactttcaccagcgtttctgggtgagcaaaaacaggaaggcaaaatgccgcaaaaaagggaataagggcgacacggaaatgttgaatactcatactcttcctttttcaatattattgaagcatttatcagggttattgtctcatgagcggatacatatttgaatgtatttagaaaaataaacaaataggggttccgcgcacatttccccgaaaagtgccacctgacgtc

SEQ ID NO: 110 - DNA, 6087 bp, Artificial Sequence
  Synthetic
gacggatcgggagatctcccgatcccctatggtgcactctcagtacaatctgctctgatgccgcatagttaagccagtatctgctccctgcttgtgtgttggaggtcgctgagtagtgcgcgagcaaaatttaagctacaacaaggcaaggcttgaccgacaattgcatgaagaatctgcttagggttaggcgttttgcgctgcttcgcgatgtacgggccagatatacgcgttgacattgattattgactagttattaatagtaatcaattacggggtcattagttcatagcccatatatggagttccgcgttacataacttacggtaaatggcccgcctggctgaccgcccaacgacccccgcccattgacgtcaataatgacgtatgttcccatagtaacgccaatagggactttccattgacgtcaatgggtggagtatttacggtaaactgcccacttggcagtacatcaagtgtatcatatgccaagtacgccccctattgacgtcaatgacggtaaatggcccgcctggcattatgcccagtacatgaccttatgggactttcctacttggcagtacatctacgtattagtcatcgctattaccatggtgatgcggttttggcagtacatcaatgggcgtggatagcggtttgactcacggggatttccaagtctccaccccattgacgtcaatgggagtttgttttggcaccaaaatcaacgggactttccaaaatgtcgtaacaactccgccccattgacgcaaatgggcggtaggcgtgtacggtgggaggtctatataagcagagctctctggctaactagagaacccactgcttactggcttatcgaaattaatacgactcactatagggagacccaagctggctagcgtttaaacttaagcttggtaccgccaccatgggcccgaaaaagaagcgaaaagttgactacaaggaccacgatggtgattataaagatcatgacatcgactataaagacgatgatgacaagggatccggaatgaagcggagctacttcaccgtcacctacctgcctatcaactgcgactacagcctgctcgctggaagatgcatcggcatcctgcacggctacctgagcagattcgagctggacggcatcggtgtttccttccccaagtggaacgaagaaaccgtgggcaaccagatcgccttcgtgtccgagtctgaaagccacctgcagacactgagacagcagaactactttcagatgatgagccacgacggactgttcaagctgagcgtgaccagaaccgtgccagagcaggtggacgagatccaatttgtgcggaaccagagcatttctaaggcctttgtgggcgagagaagacggcggatggtgagagccaagctgcgggctgaagccagaggcgaagagtacaatcctatctacgagttcgagcctacagagatcgagcatttccactctatccccatcaccagcaaaagcaacaacaatgaattcgtgctgcacatccagagaagggaatgtagcggcaccgccggcggattcaacaagtacggcttcgccacaaacgagcaccacctgggcacagtgcctagcctgtccggcctgctgatcagctgagcggccgctcgagtctagagggcccgtttaaacccgctgatcagcctcgactgtgccttctagttgccagccatctgttgtttgcccctcccccgtgccttccttgaccctggaaggtgccactcccactgtcctttcctaataaaatgaggaaattgcatcgcattgtctgagtaggtgtcattctattctggggggtggggtggggcaggacagcaagggggaggattgggaagacaatagcaggcatgctggggatgcggtgggctctatggcttctgaggcggaaagaaccagctggggctctagggggtatccccacgcgccctgtagcggcgcattaagcgcggcgggtgtggtggttacgcgcagcgtgaccgctacacttgccagcgccctagcgcccgctcctttcgctttcttcccttcctttctcgccacgttcgccggctttccccgtcaagctctaaatcgggggctccctttagggttccgatttagtgctttacggcacctcgaccccaaaaaacttgattagggtgatggttcacgtagtgggccatcgccctgatagacggtttttcgccctttgacgttggagtccacgttctttaatagtggactcttgttccaaactggaacaacactcaaccctatctcggtctattcttttgatttataagggattttgccgatttcggcctattggttaaaaaatgagctgatttaacaaaaatttaacgcgaattaattctgtggaatgtgtgtcagttagggtgtggaaagtccccaggctccccagcaggcagaagtatgcaaagcatgcatctcaattagtcagcaaccaggtgtggaaagtccccaggctccccagcaggcagaagtatgcaaagcatgcatctcaattagtcagcaaccatagtcccgcccctaactccgcccatcccgcccctaactccgcccagttccgcccattctccgccccatggctgactaattttttttatttatgcagaggccgaggccgcctctgcctctgagctattccagaagtagtgaggaggcttttttggaggcctaggcttttgcaaaaagctcccgggagcttgtatatccattttcggatctgatcaagagacaggatgaggatcgtttcgcatgattgaacaagatggattgcacgcaggttctccggccgcttgggtggagaggctattcggctatgactgggcacaacagacaatcggctgctctgatgccgccgtgttccggctgtcagcgcaggggcgcccggttctttttgtcaagaccgacctgtccggtgccctgaatgaactgcaggacgaggcagcgcggctatcgtggctggccacgacgggcgttccttgcgcagctgtgctcgacgttgtcactgaagcgggaagggactggctgctattgggcgaagtgccggggcaggatctcctgtcatctcaccttgctcctgccgagaaagtatccatcatggctgatgcaatgcggcggctgcatacgcttgatccggctacctgcccattcgaccaccaagcgaaacatcgcatcgagcgagcacgtactcggatggaagccggtcttgtcgatcaggatgatctggacgaagagcatcaggggctcgcgccagccgaactgttcgccaggctcaaggcgcgcatgcccgacggcgaggatctcgtcgtgacccatggcgatgcctgcttgccgaatatcatggtggaaaatggccgcttttctggattcatcgactgtggccggctgggtgtggcggaccgctatcaggacatagcgttggctacccgtgatattgctgaagagcttggcggcgaatgggctgaccgcttcctcgtgctttacggtatcgccgctcccgattcgcagcgcatcgccttctatcgccttcttgacgagttcttctgagcgggactctggggttcgaaatgaccgaccaagcgacgcccaacctgccatcacgagatttcgattccaccgccgccttctatgaaaggttgggcttcggaatcgttttccgggacgccggctggatgatcctccagcgcggggatctcatgctggagttcttcgcccaccccaacttgtttattgcagcttataatggttacaaataaagcaatagcatcacaaatttcacaaataaagcatttttttcactgcattctagttgtggtttgtccaaactcatcaatgtatcttatcatgtctgtataccgtcgacctctagctagagcttggcgtaatcatggtcatagctgtttcctgtgtgaaattgttatccgctcacaattccacacaacatacgagccggaagcataaagtgtaaagcctggggtgcctaatgagtgagctaactcacattaattgcgttgcgctcactgcccgctttccagtcgggaaacctgtcgtgccagctgcattaatgaatcggccaacgcgcggggagaggcggtttgcgtattgggcgctcttccgcttcctcgctcactgactcgctgcgctcggtcgttcggctgcggcgagcggtatcagctcactcaaaggcggtaatacggttatccacagaatcaggggataacgcaggaaagaacatgtgagcaaaaggccagcaaaaggccaggaaccgtaaaaaggccgcgttgctggcgtttttccataggctccgcccccctgacgagcatcacaaaaatcgacgctcaagtcagaggtggcgaaacccgacaggactataaagataccaggcgtttccccctggaagctccctcgtgcgctctcctgttccgaccctgccgcttaccggatacctgtccgcctttctcccttcgggaagcgtggcgctttctcatagctcacgctgtaggtatctcagttcggtgtaggtcgttcgctccaagctgggctgtgtgcacgaaccccccgttcagcccgaccgctgcgccttatccggtaactatcgtcttgagtccaacccggtaagacacgacttatcgccactggcagcagccactggtaacaggattagcagagcgaggtatgtaggcggtgctacagagttcttgaagtggtggcctaactacggctacactagaagaacagtatttggtatctgcgctctgctgaagccagttaccttcggaaaaagagttggtagctcttgatccggcaaacaaaccaccgctggtagcggtttttttgtttgcaagcagcagattacgcgcagaaaaaaaggatctcaagaagatcctttgatcttttctacggggtctgacgctcagtggaacgaaaactcacgttaagggattttggtcatgagattatcaaaaaggatcttcacctagatccttttaaattaaaaatgaagttttaaatcaatctaaagtatatatgagtaaacttggtctgacagttaccaatgcttaatcagtgaggcacctatctcagcgatctgtctatttcgttcatccatagttgcctgactccccgtcgtgtagataactacgatacgggagggcttaccatctggccccagtgctgcaatgataccgcgagacccacgctcaccggctccagatttatcagcaataaaccagccagccggaagggccgagcgcagaagtggtcctgcaactttatccgcctccatccagtctattaattgttgccgggaagctagagtaagtagttcgccagttaatagtttgcgcaacgttgttgccattgctacaggcatcgtggtgtcacgctcgtcgtttggtatggcttcattcagctccggttcccaacgatcaaggcgagttacatgatcccccatgttgtgcaaaaaagcggttagctccttcggtcctccgatcgttgtcagaagtaagttggccgcagtgttatcactcatggttatggcagcactgcataattctcttactgtcatgccatccgtaagatgcttttctgtgactggtgagtactcaaccaagtcattctgagaatagtgtatgcggcgaccgagttgctcttgcccggcgtcaatacgggataataccgcgccacatagcagaactttaaaagtgctcatcattggaaaacgttcttcggggcgaaaactctcaaggatcttaccgctgttgagatccagttcgatgtaacccactcgtgcacccaactgatcttcagcatcttttactttcaccagcgtttctgggtgagcaaaaacaggaaggcaaaatgccgcaaaaaagggaataagggcgacacggaaatgttgaatactcatactcttcctttttcaatattattgaagcatttatcagggttattgtctcatgagcggatacatatttgaatgtatttagaaaaataaacaaataggggttccgcgcacatttccccgaaaagtgccacctgacgtc

SEQ ID NO: 111 - DNA, 6105 bp, Artificial Sequence
  Synthetic
gacggatcgggagatctcccgatcccctatggtgcactctcagtacaatctgctctgatgccgcatagttaagccagtatctgctccctgcttgtgtgttggaggtcgctgagtagtgcgcgagcaaaatttaagctacaacaaggcaaggcttgaccgacaattgcatgaagaatctgcttagggttaggcgttttgcgctgcttcgcgatgtacgggccagatatacgcgttgacattgattattgactagttattaatagtaatcaattacggggtcattagttcatagcccatatatggagttccgcgttacataacttacggtaaatggcccgcctggctgaccgcccaacgacccccgcccattgacgtcaataatgacgtatgttcccatagtaacgccaatagggactttccattgacgtcaatgggtggagtatttacggtaaactgcccacttggcagtacatcaagtgtatcatatgccaagtacgccccctattgacgtcaatgacggtaaatggcccgcctggcattatgcccagtacatgaccttatgggactttcctacttggcagtacatctacgtattagtcatcgctattaccatggtgatgcggttttggcagtacatcaatgggcgtggatagcggtttgactcacggggatttccaagtctccaccccattgacgtcaatgggagtttgttttggcaccaaaatcaacgggactttccaaaatgtcgtaacaactccgccccattgacgcaaatgggcggtaggcgtgtacggtgggaggtctatataagcagagctctctggctaactagagaacccactgcttactggcttatcgaaattaatacgactcactatagggagacccaagctggctagcgtttaaacttaagcttggtaccgccaccatgggcccgaaaaagaagcgaaaagttgactacaaggaccacgatggtgattataaagatcatgacatcgactataaagacgatgatgacaagggatccggaatggccaatagattttacttcctgatccgctacatgcctgaggacgtggacgagggcctgctggccggcagatgtatctctatcctgcatggcgtcctgagcagcgatcagaacgacattgacggcggtatcggcgtggtgttccctcagtggagctgcaccagcctgggaagaagcatcgccttcgtgtctgataatcagagacacctggaacagctgtcccagcagcactactttgctgttatgaaaggcgacaacctgtttgacatcagccacatccaggccgtgcctagcggactgagtgaaatcagattcaagcggaaccagggcatcgctaagtgcttcgccggcgagaagagacggagactggccagagccaagcggcgggccgaggccagaggagaagtgttcaacccaaagcacggcatgagcgacagagaagtgtccctgttccacaaggccgtgatgaccagcaagagcaccggccagaagtacctgctccacatccagagggagacagtgaccggatctagcgtgtcccaatacagccaatacggcctggctacaaacatcgagtgcatgggcaccgtgcccgacctgtctcctatcatccccttcttctgagcggccgctcgagtctagagggcccgtttaaacccgctgatcagcctcgactgtgccttctagttgccagccatctgttgtttgcccctcccccgtgccttccttgaccctggaaggtgccactcccactgtcctttcctaataaaatgaggaaattgcatcgcattgtctgagtaggtgtcattctattctggggggtggggtggggcaggacagcaagggggaggattgggaagacaatagcaggcatgctggggatgcggtgggctctatggcttctgaggcggaaagaaccagctggggctctagggggtatccccacgcgccctgtagcggcgcattaagcgcggcgggtgtggtggttacgcgcagcgtgaccgctacacttgccagcgccctagcgcccgctcctttcgctttcttcccttcctttctcgccacgttcgccggctttccccgtcaagctctaaatcgggggctccctttagggttccgatttagtgctttacggcacctcgaccccaaaaaacttgattagggtgatggttcacgtagtgggccatcgccctgatagacggtttttcgccctttgacgttggagtccacgttctttaatagtggactcttgttccaaactggaacaacactcaaccctatctcggtctattcttttgatttataagggattttgccgatttcggcctattggttaaaaaatgagctgatttaacaaaaatttaacgcgaattaattctgtggaatgtgtgtcagttagggtgtggaaagtccccaggctccccagcaggcagaagtatgcaaagcatgcatctcaattagtcagcaaccaggtgtggaaagtccccaggctccccagcaggcagaagtatgcaaagcatgcatctcaattagtcagcaaccatagtcccgcccctaactccgcccatcccgcccctaactccgcccagttccgcccattctccgccccatggctgactaattttttttatttatgcagaggccgaggccgcctctgcctctgagctattccagaagtagtgaggaggcttttttggaggcctaggcttttgcaaaaagctcccgggagcttgtatatccattttcggatctgatcaagagacaggatgaggatcgtttcgcatgattgaacaagatggattgcacgcaggttctccggccgcttgggtggagaggctattcggctatgactgggcacaacagacaatcggctgctctgatgccgccgtgttccggctgtcagcgcaggggcgcccggttctttttgtcaagaccgacctgtccggtgccctgaatgaactgcaggacgaggcagcgcggctatcgtggctggccacgacgggcgttccttgcgcagctgtgctcgacgttgtcactgaagcgggaagggactggctgctattgggcgaagtgccggggcaggatctcctgtcatctcaccttgctcctgccgagaaagtatccatcatggctgatgcaatgcggcggctgcatacgcttgatccggctacctgcccattcgaccaccaagcgaaacatcgcatcgagcgagcacgtactcggatggaagccggtcttgtcgatcaggatgatctggacgaagagcatcaggggctcgcgccagccgaactgttcgccaggctcaaggcgcgcatgcccgacggcgaggatctcgtcgtgacccatggcgatgcctgcttgccgaatatcatggtggaaaatggccgcttttctggattcatcgactgtggccggctgggtgtggcggaccgctatcaggacatagcgttggctacccgtgatattgctgaagagcttggcggcgaatgggctgaccgcttcctcgtgctttacggtatcgccgctcccgattcgcagcgcatcgccttctatcgccttcttgacgagttcttctgagcgggactctggggttcgaaatgaccgaccaagcgacgcccaacctgccatcacgagatttcgattccaccgccgccttctatgaaaggttgggcttcggaatcgttttccgggacgccggctggatgatcctccagcgcggggatctcatgctggagttcttcgcccaccccaacttgtttattgcagcttataatggttacaaataaagcaatagcatcacaaatttcacaaataaagcatttttttcactgcattctagttgtggtttgtccaaactcatcaatgtatcttatcatgtctgtataccgtcgacctctagctagagcttggcgtaatcatggtcatagctgtttcctgtgtgaaattgttatccgctcacaattccacacaacatacgagccggaagcataaagtgtaaagcctggggtgcctaatgagtgagctaactcacattaattgcgttgcgctcactgcccgctttccagtcgggaaacctgtcgtgccagctgcattaatgaatcggccaacgcgcggggagaggcggtttgcgtattgggcgctcttccgcttcctcgctcactgactcgctgcgctcggtcgttcggctgcggcgagcggtatcagctcactcaaaggcggtaatacggttatccacagaatcaggggataacgcaggaaagaacatgtgagcaaaaggccagcaaaaggccaggaaccgtaaaaaggccgcgttgctggcgtttttccataggctccgcccccctgacgagcatcacaaaaatcgacgctcaagtcagaggtggcgaaacccgacaggactataaagataccaggcgtttccccctggaagctccctcgtgcgctctcctgttccgaccctgccgcttaccggatacctgtccgcctttctcccttcgggaagcgtggcgctttctcatagctcacgctgtaggtatctcagttcggtgtaggtcgttcgctccaagctgggctgtgtgcacgaaccccccgttcagcccgaccgctgcgccttatccggtaactatcgtcttgagtccaacccggtaagacacgacttatcgccactggcagcagccactggtaacaggattagcagagcgaggtatgtaggcggtgctacagagttcttgaagtggtggcctaactacggctacactagaagaacagtatttggtatctgcgctctgctgaagccagttaccttcggaaaaagagttggtagctcttgatccggcaaacaaaccaccgctggtagcggtttttttgtttgcaagcagcagattacgcgcagaaaaaaaggatctcaagaagatcctttgatcttttctacggggtctgacgctcagtggaacgaaaactcacgttaagggattttggtcatgagattatcaaaaaggatcttcacctagatccttttaaattaaaaatgaagttttaaatcaatctaaagtatatatgagtaaacttggtctgacagttaccaatgcttaatcagtgaggcacctatctcagcgatctgtctatttcgttcatccatagttgcctgactccccgtcgtgtagataactacgatacgggagggcttaccatctggccccagtgctgcaatgataccgcgagacccacgctcaccggctccagatttatcagcaataaaccagccagccggaagggccgagcgcagaagtggtcctgcaactttatccgcctccatccagtctattaattgttgccgggaagctagagtaagtagttcgccagttaatagtttgcgcaacgttgttgccattgctacaggcatcgtggtgtcacgctcgtcgtttggtatggcttcattcagctccggttcccaacgatcaaggcgagttacatgatcccccatgttgtgcaaaaaagcggttagctccttcggtcctccgatcgttgtcagaagtaagttggccgcagtgttatcactcatggttatggcagcactgcataattctcttactgtcatgccatccgtaagatgcttttctgtgactggtgagtactcaaccaagtcattctgagaatagtgtatgcggcgaccgagttgctcttgcccggcgtcaatacgggataataccgcgccacatagcagaactttaaaagtgctcatcattggaaaacgttcttcggggcgaaaactctcaaggatcttaccgctgttgagatccagttcgatgtaacccactcgtgcacccaactgatcttcagcatcttttactttcaccagcgtttctgggtgagcaaaaacaggaaggcaaaatgccgcaaaaaagggaataagggcgacacggaaatgttgaatactcatactcttcctttttcaatattattgaagcatttatcagggttattgtctcatgagcggatacatatttgaatgtatttagaaaaataaacaaataggggttccgcgcacatttccccgaaaagtgccacctgacgtc

SEQ ID NO: 112 - DNA, 6081 bp, Artificial Sequence
  Synthetic
gacggatcgggagatctcccgatcccctatggtgcactctcagtacaatctgctctgatgccgcatagttaagccagtatctgctccctgcttgtgtgttggaggtcgctgagtagtgcgcgagcaaaatttaagctacaacaaggcaaggcttgaccgacaattgcatgaagaatctgcttagggttaggcgttttgcgctgcttcgcgatgtacgggccagatatacgcgttgacattgattattgactagttattaatagtaatcaattacggggtcattagttcatagcccatatatggagttccgcgttacataacttacggtaaatggcccgcctggctgaccgcccaacgacccccgcccattgacgtcaataatgacgtatgttcccatagtaacgccaatagggactttccattgacgtcaatgggtggagtatttacggtaaactgcccacttggcagtacatcaagtgtatcatatgccaagtacgccccctattgacgtcaatgacggtaaatggcccgcctggcattatgcccagtacatgaccttatgggactttcctacttggcagtacatctacgtattagtcatcgctattaccatggtgatgcggttttggcagtacatcaatgggcgtggatagcggtttgactcacggggatttccaagtctccaccccattgacgtcaatgggagtttgttttggcaccaaaatcaacgggactttccaaaatgtcgtaacaactccgccccattgacgcaaatgggcggtaggcgtgtacggtgggaggtctatataagcagagctctctggctaactagagaacccactgcttactggcttatcgaaattaatacgactcactatagggagacccaagctggctagcgtttaaacttaagcttggtaccgccaccatgggcccgaaaaagaagcgaaaagttgactacaaggaccacgatggtgattataaagatcatgacatcgactataaagacgatgatgacaagggatccggaatgcatagatactacttcatggtgcggtttctgcctgaacaggccaacctggccctgctgatgggcagatgcatcagcatcatgcacggcttcatctgcaagcacgacatccagggcctgggcgtcagcttcccagcctggtccgacgccagcattggaaatatgatcgccttcgtgcacacagacatcgccgctctgaacgagctgaaactgcagggctactttcaggacatgcaggagtgcggcgtcttcaaggtggacaacgtggaagccgtgcctgatgattgcgtggaagtgcggttcaagcggaaccagggcatcgctaagatgttcgtgggcgaggccagaaggcggctgaagagactggaaaagcgcgccctggctagaggcgaagttttcaaccccaacaagaacgacgagcctagagagctggactgttttcactgtatcgccatcggatctaccagcaccgagcaagacttcctgctgcacgtgcagaaggaaatcgtgcagaaatacgaggaacctgagttcaatcaatacggcctggccaccaacaagctgctcagaggaacagtgcccgagttcagcgagttctgagcggccgctcgagtctagagggcccgtttaaacccgctgatcagcctcgactgtgccttctagttgccagccatctgttgtttgcccctcccccgtgccttccttgaccctggaaggtgccactcccactgtcctttcctaataaaatgaggaaattgcatcgcattgtctgagtaggtgtcattctattctggggggtggggtggggcaggacagcaagggggaggattgggaagacaatagcaggcatgctggggatgcggtgggctctatggcttctgaggcggaaagaaccagctggggctctagggggtatccccacgcgccctgtagcggcgcattaagcgcggcgggtgtggtggttacgcgcagcgtgaccgctacacttgccagcgccctagcgcccgctcctttcgctttcttcccttcctttctcgccacgttcgccggctttccccgtcaagctctaaatcgggggctccctttagggttccgatttagtgctttacggcacctcgaccccaaaaaacttgattagggtgatggttcacgtagtgggccatcgccctgatagacggtttttcgccctttgacgttggagtccacgttctttaatagtggactcttgttccaaactggaacaacactcaaccctatctcggtctattcttttgatttataagggattttgccgatttcggcctattggttaaaaaatgagctgatttaacaaaaatttaacgcgaattaattctgtggaatgtgtgtcagttagggtgtggaaagtccccaggctccccagcaggcagaagtatgcaaagcatgcatctcaattagtcagcaaccaggtgtggaaagtccccaggctccccagcaggcagaagtatgcaaagcatgcatctcaattagtcagcaaccatagtcccgcccctaactccgcccatcccgcccctaactccgcccagttccgcccattctccgccccatggctgactaattttttttatttatgcagaggccgaggccgcctctgcctctgagctattccagaagtagtgaggaggcttttttggaggcctaggcttttgcaaaaagctcccgggagcttgtatatccattttcggatctgatcaagagacaggatgaggatcgtttcgcatgattgaacaagatggattgcacgcaggttctccggccgcttgggtggagaggctattcggctatgactgggcacaacagacaatcggctgctctgatgccgccgtgttccggctgtcagcgcaggggcgcccggttctttttgtcaagaccgacctgtccggtgccctgaatgaactgcaggacgaggcagcgcggctatcgtggctggccacgacgggcgttccttgcgcagctgtgctcgacgttgtcactgaagcgggaagggactggctgctattgggcgaagtgccggggcaggatctcctgtcatctcaccttgctcctgccgagaaagtatccatcatggctgatgcaatgcggcggctgcatacgcttgatccggctacctgcccattcgaccaccaagcgaaacatcgcatcgagcgagcacgtactcggatggaagccggtcttgtcgatcaggatgatctggacgaagagcatcaggggctcgcgccagccgaactgttcgccaggctcaaggcgcgcatgcccgacggcgaggatctcgtcgtgacccatggcgatgcctgcttgccgaatatcatggtggaaaatggccgcttttctggattcatcgactgtggccggctgggtgtggcggaccgctatcaggacatagcgttggctacccgtgatattgctgaagagcttggcggcgaatgggctgaccgcttcctcgtgctttacggtatcgccgctcccgattcgcagcgcatcgccttctatcgccttcttgacgagttcttctgagcgggactctggggttcgaaatgaccgaccaagcgacgcccaacctgccatcacgagatttcgattccaccgccgccttctatgaaaggttgggcttcggaatcgttttccgggacgccggctggatgatcctccagcgcggggatctcatgctggagttcttcgcccaccccaacttgtttattgcagcttataatggttacaaataaagcaatagcatcacaaatttcacaaataaagcatttttttcactgcattctagttgtggtttgtccaaactcatcaatgtatcttatcatgtctgtataccgtcgacctctagctagagcttggcgtaatcatggtcatagctgtttcctgtgtgaaattgttatccgctcacaattccacacaacatacgagccggaagcataaagtgtaaagcctggggtgcctaatgagtgagctaactcacattaattgcgttgcgctcactgcccgctttccagtcgggaaacctgtcgtgccagctgcattaatgaatcggccaacgcgcggggagaggcggtttgcgtattgggcgctcttccgcttcctcgctcactgactcgctgcgctcggtcgttcggctgcggcgagcggtatcagctcactcaaaggcggtaatacggttatccacagaatcaggggataacgcaggaaagaacatgtgagcaaaaggccagcaaaaggccaggaaccgtaaaaaggccgcgttgctggcgtttttccataggctccgcccccctgacgagcatcacaaaaatcgacgctcaagtcagaggtggcgaaacccgacaggactataaagataccaggcgtttccccctggaagctccctcgtgcgctctcctgttccgaccctgccgcttaccggatacctgtccgcctttctcccttcgggaagcgtggcgctttctcatagctcacgctgtaggtatctcagttcggtgtaggtcgttcgctccaagctgggctgtgtgcacgaaccccccgttcagcccgaccgctgcgccttatccggtaactatcgtcttgagtccaacccggtaagacacgacttatcgccactggcagcagccactggtaacaggattagcagagcgaggtatgtaggcggtgctacagagttcttgaagtggtggcctaactacggctacactagaagaacagtatttggtatctgcgctctgctgaagccagttaccttcggaaaaagagttggtagctcttgatccggcaaacaaaccaccgctggtagcggtttttttgtttgcaagcagcagattacgcgcagaaaaaaaggatctcaagaagatcctttgatcttttctacggggtctgacgctcagtggaacgaaaactcacgttaagggattttggtcatgagattatcaaaaaggatcttcacctagatccttttaaattaaaaatgaagttttaaatcaatctaaagtatatatgagtaaacttggtctgacagttaccaatgcttaatcagtgaggcacctatctcagcgatctgtctatttcgttcatccatagttgcctgactccccgtcgtgtagataactacgatacgggagggcttaccatctggccccagtgctgcaatgataccgcgagacccacgctcaccggctccagatttatcagcaataaaccagccagccggaagggccgagcgcagaagtggtcctgcaactttatccgcctccatccagtctattaattgttgccgggaagctagagtaagtagttcgccagttaatagtttgcgcaacgttgttgccattgctacaggcatcgtggtgtcacgctcgtcgtttggtatggcttcattcagctccggttcccaacgatcaaggcgagttacatgatcccccatgttgtgcaaaaaagcggttagctccttcggtcctccgatcgttgtcagaagtaagttggccgcagtgttatcactcatggttatggcagcactgcataattctcttactgtcatgccatccgtaagatgcttttctgtgactggtgagtactcaaccaagtcattctgagaatagtgtatgcggcgaccgagttgctcttgcccggcgtcaatacgggataataccgcgccacatagcagaactttaaaagtgctcatcattggaaaacgttcttcggggcgaaaactctcaaggatcttaccgctgttgagatccagttcgatgtaacccactcgtgcacccaactgatcttcagcatcttttactttcaccagcgtttctgggtgagcaaaaacaggaaggcaaaatgccgcaaaaaagggaataagggcgacacggaaatgttgaatactcatactcttcctttttcaatattattgaagcatttatcagggttattgtctcatgagcggatacatatttgaatgtatttagaaaaataaacaaataggggttccgcgcacatttccccgaaaagtgccacctgacgtc

SEQ ID NO: 113 - DNA, 6093 bp, Artificial Sequence
  Synthetic
gacggatcgggagatctcccgatcccctatggtgcactctcagtacaatctgctctgatgccgcatagttaagccagtatctgctccctgcttgtgtgttggaggtcgctgagtagtgcgcgagcaaaatttaagctacaacaaggcaaggcttgaccgacaattgcatgaagaatctgcttagggttaggcgttttgcgctgcttcgcgatgtacgggccagatatacgcgttgacattgattattgactagttattaatagtaatcaattacggggtcattagttcatagcccatatatggagttccgcgttacataacttacggtaaatggcccgcctggctgaccgcccaacgacccccgcccattgacgtcaataatgacgtatgttcccatagtaacgccaatagggactttccattgacgtcaatgggtggagtatttacggtaaactgcccacttggcagtacatcaagtgtatcatatgccaagtacgccccctattgacgtcaatgacggtaaatggcccgcctggcattatgcccagtacatgaccttatgggactttcctacttggcagtacatctacgtattagtcatcgctattaccatggtgatgcggttttggcagtacatcaatgggcgtggatagcggtttgactcacggggatttccaagtctccaccccattgacgtcaatgggagtttgttttggcaccaaaatcaacgggactttccaaaatgtcgtaacaactccgccccattgacgcaaatgggcggtaggcgtgtacggtgggaggtctatataagcagagctctctggctaactagagaacccactgcttactggcttatcgaaattaatacgactcactatagggagacccaagctggctagcgtttaaacttaagcttggtaccgccaccatgggcccgaaaaagaagcgaaaagttgactacaaggaccacgatggtgattataaagatcatgacatcgactataaagacgatgatgacaagggatccggaatggaaagcagatactacttcagcatccggtacatccccgagcacgtggacaacgagctgctggccggcaggtgtatctccaacatgcacggcttcctgagccacgagagaaacacacagttcaagaactctgtgggcatctgcttccccctgtggaacgagcagacagtgggaaatgtgatcacatttgtgtccaccaatgaaagcatcctgaccggcctgagctaccagccttacttttctaccatgatgaacgagaacctgttcgagattagcggtattagaatcgtcccagacgacgccaaggatgtgcggttcgttttcaacaagaccatccagaaaatcttcaatggcagcaagaaaagaagaatcaagcgcgccatgaaaagagctgaggaattcggccacaccttcacccctatcagcgtggaggtgcgggaattcgagctgtttcacgagatccctatcaacagcaaaagcagcggccgggacttcgtgctgcacatccaaagacagaaccccgtggaagccgaaatcggacagggcttcaacggctacggctttgccagcaaccagctctggcggagaaccgtgcctctgatcctgttctgagcggccgctcgagtctagagggcccgtttaaacccgctgatcagcctcgactgtgccttctagttgccagccatctgttgtttgcccctcccccgtgccttccttgaccctggaaggtgccactcccactgtcctttcctaataaaatgaggaaattgcatcgcattgtctgagtaggtgtcattctattctggggggtggggtggggcaggacagcaagggggaggattgggaagacaatagcaggcatgctggggatgcggtgggctctatggcttctgaggcggaaagaaccagctggggctctagggggtatccccacgcgccctgtagcggcgcattaagcgcggcgggtgtggtggttacgcgcagcgtgaccgctacacttgccagcgccctagcgcccgctcctttcgctttcttcccttcctttctcgccacgttcgccggctttccccgtcaagctctaaatcgggggctccctttagggttccgatttagtgctttacggcacctcgaccccaaaaaacttgattagggtgatggttcacgtagtgggccatcgccctgatagacggtttttcgccctttgacgttggagtccacgttctttaatagtggactcttgttccaaactggaacaacactcaaccctatctcggtctattcttttgatttataagggattttgccgatttcggcctattggttaaaaaatgagctgatttaacaaaaatttaacgcgaattaattctgtggaatgtgtgtcagttagggtgtggaaagtccccaggctccccagcaggcagaagtatgcaaagcatgcatctcaattagtcagcaaccaggtgtggaaagtccccaggctccccagcaggcagaagtatgcaaagcatgcatctcaattagtcagcaaccatagtcccgcccctaactccgcccatcccgcccctaactccgcccagttccgcccattctccgccccatggctgactaattttttttatttatgcagaggccgaggccgcctctgcctctgagctattccagaagtagtgaggaggcttttttggaggcctaggcttttgcaaaaagctcccgggagcttgtatatccattttcggatctgatcaagagacaggatgaggatcgtttcgcatgattgaacaagatggattgcacgcaggttctccggccgcttgggtggagaggctattcggctatgactgggcacaacagacaatcggctgctctgatgccgccgtgttccggctgtcagcgcaggggcgcccggttctttttgtcaagaccgacctgtccggtgccctgaatgaactgcaggacgaggcagcgcggctatcgtggctggccacgacgggcgttccttgcgcagctgtgctcgacgttgtcactgaagcgggaagggactggctgctattgggcgaagtgccggggcaggatctcctgtcatctcaccttgctcctgccgagaaagtatccatcatggctgatgcaatgcggcggctgcatacgcttgatccggctacctgcccattcgaccaccaagcgaaacatcgcatcgagcgagcacgtactcggatggaagccggtcttgtcgatcaggatgatctggacgaagagcatcaggggctcgcgccagccgaactgttcgccaggctcaaggcgcgcatgcccgacggcgaggatctcgtcgtgacccatggcgatgcctgcttgccgaatatcatggtggaaaatggccgcttttctggattcatcgactgtggccggctgggtgtggcggaccgctatcaggacatagcgttggctacccgtgatattgctgaagagcttggcggcgaatgggctgaccgcttcctcgtgctttacggtatcgccgctcccgattcgcagcgcatcgccttctatcgccttcttgacgagttcttctgagcgggactctggggttcgaaatgaccgaccaagcgacgcccaacctgccatcacgagatttcgattccaccgccgccttctatgaaaggttgggcttcggaatcgttttccgggacgccggctggatgatcctccagcgcggggatctcatgctggagttcttcgcccaccccaacttgtttattgcagcttataatggttacaaataaagcaatagcatcacaaatttcacaaataaagcatttttttcactgcattctagttgtggtttgtccaaactcatcaatgtatcttatcatgtctgtataccgtcgacctctagctagagcttggcgtaatcatggtcatagctgtttcctgtgtgaaattgttatccgctcacaattccacacaacatacgagccggaagcataaagtgtaaagcctggggtgcctaatgagtgagctaactcacattaattgcgttgcgctcactgcccgctttccagtcgggaaacctgtcgtgccagctgcattaatgaatcggccaacgcgcggggagaggcggtttgcgtattgggcgctcttccgcttcctcgctcactgactcgctgcgctcggtcgttcggctgcggcgagcggtatcagctcactcaaaggcggtaatacggttatccacagaatcaggggataacgcaggaaagaacatgtgagcaaaaggccagcaaaaggccaggaaccgtaaaaaggccgcgttgctggcgtttttccataggctccgcccccctgacgagcatcacaaaaatcgacgctcaagtcagaggtggcgaaacccgacaggactataaagataccaggcgtttccccctggaagctccctcgtgcgctctcctgttccgaccctgccgcttaccggatacctgtccgcctttctcccttcgggaagcgtggcgctttctcatagctcacgctgtaggtatctcagttcggtgtaggtcgttcgctccaagctgggctgtgtgcacgaaccccccgttcagcccgaccgctgcgccttatccggtaactatcgtcttgagtccaacccggtaagacacgacttatcgccactggcagcagccactggtaacaggattagcagagcgaggtatgtaggcggtgctacagagttcttgaagtggtggcctaactacggctacactagaagaacagtatttggtatctgcgctctgctgaagccagttaccttcggaaaaagagttggtagctcttgatccggcaaacaaaccaccgctggtagcggtttttttgtttgcaagcagcagattacgcgcagaaaaaaaggatctcaagaagatcctttgatcttttctacggggtctgacgctcagtggaacgaaaactcacgttaagggattttggtcatgagattatcaaaaaggatcttcacctagatccttttaaattaaaaatgaagttttaaatcaatctaaagtatatatgagtaaacttggtctgacagttaccaatgcttaatcagtgaggcacctatctcagcgatctgtctatttcgttcatccatagttgcctgactccccgtcgtgtagataactacgatacgggagggcttaccatctggccccagtgctgcaatgataccgcgagacccacgctcaccggctccagatttatcagcaataaaccagccagccggaagggccgagcgcagaagtggtcctgcaactttatccgcctccatccagtctattaattgttgccgggaagctagagtaagtagttcgccagttaatagtttgcgcaacgttgttgccattgctacaggcatcgtggtgtcacgctcgtcgtttggtatggcttcattcagctccggttcccaacgatcaaggcgagttacatgatcccccatgttgtgcaaaaaagcggttagctccttcggtcctccgatcgttgtcagaagtaagttggccgcagtgttatcactcatggttatggcagcactgcataattctcttactgtcatgccatccgtaagatgcttttctgtgactggtgagtactcaaccaagtcattctgagaatagtgtatgcggcgaccgagttgctcttgcccggcgtcaatacgggataataccgcgccacatagcagaactttaaaagtgctcatcattggaaaacgttcttcggggcgaaaactctcaaggatcttaccgctgttgagatccagttcgatgtaacccactcgtgcacccaactgatcttcagcatcttttactttcaccagcgtttctgggtgagcaaaaacaggaaggcaaaatgccgcaaaaaagggaataagggcgacacggaaatgttgaatactcatactcttcctttttcaatattattgaagcatttatcagggttattgtctcatgagcggatacatatttgaatgtatttagaaaaataaacaaataggggttccgcgcacatttccccgaaaagtgccacctgacgtc

SEQ ID NO: 114 - DNA, 6120 bp, Artificial Sequence
  Synthetic
gacggatcgggagatctcccgatcccctatggtgcactctcagtacaatctgctctgatgccgcatagttaagccagtatctgctccctgcttgtgtgttggaggtcgctgagtagtgcgcgagcaaaatttaagctacaacaaggcaaggcttgaccgacaattgcatgaagaatctgcttagggttaggcgttttgcgctgcttcgcgatgtacgggccagatatacgcgttgacattgattattgactagttattaatagtaatcaattacggggtcattagttcatagcccatatatggagttccgcgttacataacttacggtaaatggcccgcctggctgaccgcccaacgacccccgcccattgacgtcaataatgacgtatgttcccatagtaacgccaatagggactttccattgacgtcaatgggtggagtatttacggtaaactgcccacttggcagtacatcaagtgtatcatatgccaagtacgccccctattgacgtcaatgacggtaaatggcccgcctggcattatgcccagtacatgaccttatgggactttcctacttggcagtacatctacgtattagtcatcgctattaccatggtgatgcggttttggcagtacatcaatgggcgtggatagcggtttgactcacggggatttccaagtctccaccccattgacgtcaatgggagtttgttttggcaccaaaatcaacgggactttccaaaatgtcgtaacaactccgccccattgacgcaaatgggcggtaggcgtgtacggtgggaggtctatataagcagagctctctggctaactagagaacccactgcttactggcttatcgaaattaatacgactcactatagggagacccaagctggctagcgtttaaacttaagcttggtaccgccaccatgggcccgaaaaagaagcgaaaagttgactacaaggaccacgatggtgattataaagatcatgacatcgactataaagacgatgatgacaagggatccggaatgagccaaagatactacttcctgatcagatatacaaatgccaacgccgattacggcctgctggccggcagatgcatcagccagatgcacctgtttatggtcaaccaccaccaggccatgaacagagtgggcgtgtccttccctgactggaacgagagcagcgtgggccagaccatcgccttcgtgtctgaagataaggaaatgatgatcggcctgagctttcagccttacttcagcctgatggtgaacgagggcctgttcgagatcagctctgtgtacgaggttccagacaccagcgaggaagtgcggttcgtgcggaaccagaccattggcaagaacttcctgggcagcaagaagcgcagaatcaagcggagcatggctagagccgagctcttcggcatccagcagtctctgcctgtgaccaatgaggatagagccatcgacagctttcaccaaatccctatcagctccggctccagcagacaggactacatcctgttcatccagaaggaactggctgatgagcgggctgaaagcggtttcaatagctacggatttgccacaaaccaggagaagcgggccaccgtgcccgacctgagattcaaccccttcgacgaagacagcttcctggtgcagtgagcggccgctcgagtctagagggcccgtttaaacccgctgatcagcctcgactgtgccttctagttgccagccatctgttgtttgcccctcccccgtgccttccttgaccctggaaggtgccactcccactgtcctttcctaataaaatgaggaaattgcatcgcattgtctgagtaggtgtcattctattctggggggtggggtggggcaggacagcaagggggaggattgggaagacaatagcaggcatgctggggatgcggtgggctctatggcttctgaggcggaaagaaccagctggggctctagggggtatccccacgcgccctgtagcggcgcattaagcgcggcgggtgtggtggttacgcgcagcgtgaccgctacacttgccagcgccctagcgcccgctcctttcgctttcttcccttcctttctcgccacgttcgccggctttccccgtcaagctctaaatcgggggctccctttagggttccgatttagtgctttacggcacctcgaccccaaaaaacttgattagggtgatggttcacgtagtgggccatcgccctgatagacggtttttcgccctttgacgttggagtccacgttctttaatagtggactcttgttccaaactggaacaacactcaaccctatctcggtctattcttttgatttataagggattttgccgatttcggcctattggttaaaaaatgagctgatttaacaaaaatttaacgcgaattaattctgtggaatgtgtgtcagttagggtgtggaaagtccccaggctccccagcaggcagaagtatgcaaagcatgcatctcaattagtcagcaaccaggtgtggaaagtccccaggctccccagcaggcagaagtatgcaaagcatgcatctcaattagtcagcaaccatagtcccgcccctaactccgcccatcccgcccctaactccgcccagttccgcccattctccgccccatggctgactaattttttttatttatgcagaggccgaggccgcctctgcctctgagctattccagaagtagtgaggaggcttttttggaggcctaggcttttgcaaaaagctcccgggagcttgtatatccattttcggatctgatcaagagacaggatgaggatcgtttcgcatgattgaacaagatggattgcacgcaggttctccggccgcttgggtggagaggctattcggctatgactgggcacaacagacaatcggctgctctgatgccgccgtgttccggctgtcagcgcaggggcgcccggttctttttgtcaagaccgacctgtccggtgccctgaatgaactgcaggacgaggcagcgcggctatcgtggctggccacgacgggcgttccttgcgcagctgtgctcgacgttgtcactgaagcgggaagggactggctgctattgggcgaagtgccggggcaggatctcctgtcatctcaccttgctcctgccgagaaagtatccatcatggctgatgcaatgcggcggctgcatacgcttgatccggctacctgcccattcgaccaccaagcgaaacatcgcatcgagcgagcacgtactcggatggaagccggtcttgtcgatcaggatgatctggacgaagagcatcaggggctcgcgccagccgaactgttcgccaggctcaaggcgcgcatgcccgacggcgaggatctcgtcgtgacccatggcgatgcctgcttgccgaatatcatggtggaaaatggccgcttttctggattcatcgactgtggccggctgggtgtggcggaccgctatcaggacatagcgttggctacccgtgatattgctgaagagcttggcggcgaatgggctgaccgcttcctcgtgctttacggtatcgccgctcccgattcgcagcgcatcgccttctatcgccttcttgacgagttcttctgagcgggactctggggttcgaaatgaccgaccaagcgacgcccaacctgccatcacgagatttcgattccaccgccgccttctatgaaaggttgggcttcggaatcgttttccgggacgccggctggatgatcctccagcgcggggatctcatgctggagttcttcgcccaccccaacttgtttattgcagcttataatggttacaaataaagcaatagcatcacaaatttcacaaataaagcatttttttcactgcattctagttgtggtttgtccaaactcatcaatgtatcttatcatgtctgtataccgtcgacctctagctagagcttggcgtaatcatggtcatagctgtttcctgtgtgaaattgttatccgctcacaattccacacaacatacgagccggaagcataaagtgtaaagcctggggtgcctaatgagtgagctaactcacattaattgcgttgcgctcactgcccgctttccagtcgggaaacctgtcgtgccagctgcattaatgaatcggccaacgcgcggggagaggcggtttgcgtattgggcgctcttccgcttcctcgctcactgactcgctgcgctcggtcgttcggctgcggcgagcggtatcagctcactcaaaggcggtaatacggttatccacagaatcaggggataacgcaggaaagaacatgtgagcaaaaggccagcaaaaggccaggaaccgtaaaaaggccgcgttgctggcgtttttccataggctccgcccccctgacgagcatcacaaaaatcgacgctcaagtcagaggtggcgaaacccgacaggactataaagataccaggcgtttccccctggaagctccctcgtgcgctctcctgttccgaccctgccgcttaccggatacctgtccgcctttctcccttcgggaagcgtggcgctttctcatagctcacgctgtaggtatctcagttcggtgtaggtcgttcgctccaagctgggctgtgtgcacgaaccccccgttcagcccgaccgctgcgccttatccggtaactatcgtcttgagtccaacccggtaagacacgacttatcgccactggcagcagccactggtaacaggattagcagagcgaggtatgtaggcggtgctacagagttcttgaagtggtggcctaactacggctacactagaagaacagtatttggtatctgcgctctgctgaagccagttaccttcggaaaaagagttggtagctcttgatccggcaaacaaaccaccgctggtagcggtttttttgtttgcaagcagcagattacgcgcagaaaaaaaggatctcaagaagatcctttgatcttttctacggggtctgacgctcagtggaacgaaaactcacgttaagggattttggtcatgagattatcaaaaaggatcttcacctagatccttttaaattaaaaatgaagttttaaatcaatctaaagtatatatgagtaaacttggtctgacagttaccaatgcttaatcagtgaggcacctatctcagcgatctgtctatttcgttcatccatagttgcctgactccccgtcgtgtagataactacgatacgggagggcttaccatctggccccagtgctgcaatgataccgcgagacccacgctcaccggctccagatttatcagcaataaaccagccagccggaagggccgagcgcagaagtggtcctgcaactttatccgcctccatccagtctattaattgttgccgggaagctagagtaagtagttcgccagttaatagtttgcgcaacgttgttgccattgctacaggcatcgtggtgtcacgctcgtcgtttggtatggcttcattcagctccggttcccaacgatcaaggcgagttacatgatcccccatgttgtgcaaaaaagcggttagctccttcggtcctccgatcgttgtcagaagtaagttggccgcagtgttatcactcatggttatggcagcactgcataattctcttactgtcatgccatccgtaagatgcttttctgtgactggtgagtactcaaccaagtcattctgagaatagtgtatgcggcgaccgagttgctcttgcccggcgtcaatacgggataataccgcgccacatagcagaactttaaaagtgctcatcattggaaaacgttcttcggggcgaaaactctcaaggatcttaccgctgttgagatccagttcgatgtaacccactcgtgcacccaactgatcttcagcatcttttactttcaccagcgtttctgggtgagcaaaaacaggaaggcaaaatgccgcaaaaaagggaataagggcgacacggaaatgttgaatactcatactcttcctttttcaatattattgaagcatttatcagggttattgtctcatgagcggatacatatttgaatgtatttagaaaaataaacaaataggggttccgcgcacatttccccgaaaagtgccacctgacgtc

SEQ ID NO: 115 - DNA, 6084 bp, Artificial Sequence
  Synthetic
gacggatcgggagatctcccgatcccctatggtgcactctcagtacaatctgctctgatgccgcatagttaagccagtatctgctccctgcttgtgtgttggaggtcgctgagtagtgcgcgagcaaaatttaagctacaacaaggcaaggcttgaccgacaattgcatgaagaatctgcttagggttaggcgttttgcgctgcttcgcgatgtacgggccagatatacgcgttgacattgattattgactagttattaatagtaatcaattacggggtcattagttcatagcccatatatggagttccgcgttacataacttacggtaaatggcccgcctggctgaccgcccaacgacccccgcccattgacgtcaataatgacgtatgttcccatagtaacgccaatagggactttccattgacgtcaatgggtggagtatttacggtaaactgcccacttggcagtacatcaagtgtatcatatgccaagtacgccccctattgacgtcaatgacggtaaatggcccgcctggcattatgcccagtacatgaccttatgggactttcctacttggcagtacatctacgtattagtcatcgctattaccatggtgatgcggttttggcagtacatcaatgggcgtggatagcggtttgactcacggggatttccaagtctccaccccattgacgtcaatgggagtttgttttggcaccaaaatcaacgggactttccaaaatgtcgtaacaactccgccccattgacgcaaatgggcggtaggcgtgtacggtgggaggtctatataagcagagctctctggctaactagagaacccactgcttactggcttatcgaaattaatacgactcactatagggagacccaagctggctagcgtttaaacttaagcttggtaccgccaccatgggcccgaaaaagaagcgaaaagttgactacaaggaccacgatggtgattataaagatcatgacatcgactataaagacgatgatgacaagggatccggaatgaacaagcgctattttttctacatcagatacctgcctgagcaggtcgactgcggcctgctggccggcagatgcatctctcagatgcacaagttcatggtgaacaacaagcaggccatgaatcaaatcggcgtgtcctttccttgttggtgcgccgatagcgttggaaatagcatcgcttttatcagcgaggacaaggacctgctgatcggactgaccttccagccttacttcagcgtcatgaaagaagaggaactcttcgagctgagcgacgtgcaccaggtgccagaaggcgccacagagctgagattcgtgcggaaccagaccatcggaaagtccttcattggtagcaagaagcggagaatgaaaaggtctatcgctagagccgagctgaccgactctcagagcctgcctgtggccgacgaggatagagaggtggaacatttccacagaatccccatcagcagcggcagcagcagacaggacttcatcctgcacgtgcagaaggaacacgtgggcgagagcgtgcccacaaacttcaacagctacggcttcgccaccaaccaagacaagagaggcaccgtgcctgacatccacatctgagcggccgctcgagtctagagggcccgtttaaacccgctgatcagcctcgactgtgccttctagttgccagccatctgttgtttgcccctcccccgtgccttccttgaccctggaaggtgccactcccactgtcctttcctaataaaatgaggaaattgcatcgcattgtctgagtaggtgtcattctattctggggggtggggtggggcaggacagcaagggggaggattgggaagacaatagcaggcatgctggggatgcggtgggctctatggcttctgaggcggaaagaaccagctggggctctagggggtatccccacgcgccctgtagcggcgcattaagcgcggcgggtgtggtggttacgcgcagcgtgaccgctacacttgccagcgccctagcgcccgctcctttcgctttcttcccttcctttctcgccacgttcgccggctttccccgtcaagctctaaatcgggggctccctttagggttccgatttagtgctttacggcacctcgaccccaaaaaacttgattagggtgatggttcacgtagtgggccatcgccctgatagacggtttttcgccctttgacgttggagtccacgttctttaatagtggactcttgttccaaactggaacaacactcaaccctatctcggtctattcttttgatttataagggattttgccgatttcggcctattggttaaaaaatgagctgatttaacaaaaatttaacgcgaattaattctgtggaatgtgtgtcagttagggtgtggaaagtccccaggctccccagcaggcagaagtatgcaaagcatgcatctcaattagtcagcaaccaggtgtggaaagtccccaggctccccagcaggcagaagtatgcaaagcatgcatctcaattagtcagcaaccatagtcccgcccctaactccgcccatcccgcccctaactccgcccagttccgcccattctccgccccatggctgactaattttttttatttatgcagaggccgaggccgcctctgcctctgagctattccagaagtagtgaggaggcttttttggaggcctaggcttttgcaaaaagctcccgggagcttgtatatccattttcggatctgatcaagagacaggatgaggatcgtttcgcatgattgaacaagatggattgcacgcaggttctccggccgcttgggtggagaggctattcggctatgactgggcacaacagacaatcggctgctctgatgccgccgtgttccggctgtcagcgcaggggcgcccggttctttttgtcaagaccgacctgtccggtgccctgaatgaactgcaggacgaggcagcgcggctatcgtggctggccacgacgggcgttccttgcgcagctgtgctcgacgttgtcactgaagcgggaagggactggctgctattgggcgaagtgccggggcaggatctcctgtcatctcaccttgctcctgccgagaaagtatccatcatggctgatgcaatgcggcggctgcatacgcttgatccggctacctgcccattcgaccaccaagcgaaacatcgcatcgagcgagcacgtactcggatggaagccggtcttgtcgatcaggatgatctggacgaagagcatcaggggctcgcgccagccgaactgttcgccaggctcaaggcgcgcatgcccgacggcgaggatctcgtcgtgacccatggcgatgcctgcttgccgaatatcatggtggaaaatggccgcttttctggattcatcgactgtggccggctgggtgtggcggaccgctatcaggacatagcgttggctacccgtgatattgctgaagagcttggcggcgaatgggctgaccgcttcctcgtgctttacggtatcgccgctcccgattcgcagcgcatcgccttctatcgccttcttgacgagttcttctgagcgggactctggggttcgaaatgaccgaccaagcgacgcccaacctgccatcacgagatttcgattccaccgccgccttctatgaaaggttgggcttcggaatcgttttccgggacgccggctggatgatcctccagcgcggggatctcatgctggagttcttcgcccaccccaacttgtttattgcagcttataatggttacaaataaagcaatagcatcacaaatttcacaaataaagcatttttttcactgcattctagttgtggtttgtccaaactcatcaatgtatcttatcatgtctgtataccgtcgacctctagctagagcttggcgtaatcatggtcatagctgtttcctgtgtgaaattgttatccgctcacaattccacacaacatacgagccggaagcataaagtgtaaagcctggggtgcctaatgagtgagctaactcacattaattgcgttgcgctcactgcccgctttccagtcgggaaacctgtcgtgccagctgcattaatgaatcggccaacgcgcggggagaggcggtttgcgtattgggcgctcttccgcttcctcgctcactgactcgctgcgctcggtcgttcggctgcggcgagcggtatcagctcactcaaaggcggtaatacggttatccacagaatcaggggataacgcaggaaagaacatgtgagcaaaaggccagcaaaaggccaggaaccgtaaaaaggccgcgttgctggcgtttttccataggctccgcccccctgacgagcatcacaaaaatcgacgctcaagtcagaggtggcgaaacccgacaggactataaagataccaggcgtttccccctggaagctccctcgtgcgctctcctgttccgaccctgccgcttaccggatacctgtccgcctttctcccttcgggaagcgtggcgctttctcatagctcacgctgtaggtatctcagttcggtgtaggtcgttcgctccaagctgggctgtgtgcacgaaccccccgttcagcccgaccgctgcgccttatccggtaactatcgtcttgagtccaacccggtaagacacgacttatcgccactggcagcagccactggtaacaggattagcagagcgaggtatgtaggcggtgctacagagttcttgaagtggtggcctaactacggctacactagaagaacagtatttggtatctgcgctctgctgaagccagttaccttcggaaaaagagttggtagctcttgatccggcaaacaaaccaccgctggtagcggtttttttgtttgcaagcagcagattacgcgcagaaaaaaaggatctcaagaagatcctttgatcttttctacggggtctgacgctcagtggaacgaaaactcacgttaagggattttggtcatgagattatcaaaaaggatcttcacctagatccttttaaattaaaaatgaagttttaaatcaatctaaagtatatatgagtaaacttggtctgacagttaccaatgcttaatcagtgaggcacctatctcagcgatctgtctatttcgttcatccatagttgcctgactccccgtcgtgtagataactacgatacgggagggcttaccatctggccccagtgctgcaatgataccgcgagacccacgctcaccggctccagatttatcagcaataaaccagccagccggaagggccgagcgcagaagtggtcctgcaactttatccgcctccatccagtctattaattgttgccgggaagctagagtaagtagttcgccagttaatagtttgcgcaacgttgttgccattgctacaggcatcgtggtgtcacgctcgtcgtttggtatggcttcattcagctccggttcccaacgatcaaggcgagttacatgatcccccatgttgtgcaaaaaagcggttagctccttcggtcctccgatcgttgtcagaagtaagttggccgcagtgttatcactcatggttatggcagcactgcataattctcttactgtcatgccatccgtaagatgcttttctgtgactggtgagtactcaaccaagtcattctgagaatagtgtatgcggcgaccgagttgctcttgcccggcgtcaatacgggataataccgcgccacatagcagaactttaaaagtgctcatcattggaaaacgttcttcggggcgaaaactctcaaggatcttaccgctgttgagatccagttcgatgtaacccactcgtgcacccaactgatcttcagcatcttttactttcaccagcgtttctgggtgagcaaaaacaggaaggcaaaatgccgcaaaaaagggaataagggcgacacggaaatgttgaatactcatactcttcctttttcaatattattgaagcatttatcagggttattgtctcatgagcggatacatatttgaatgtatttagaaaaataaacaaataggggttccgcgcacatttccccgaaaagtgccacctgacgtc

SEQ ID NO: 116 - DNA, 6081 bp, Artificial Sequence
  Synthetic
gacggatcgggagatctcccgatcccctatggtgcactctcagtacaatctgctctgatgccgcatagttaagccagtatctgctccctgcttgtgtgttggaggtcgctgagtagtgcgcgagcaaaatttaagctacaacaaggcaaggcttgaccgacaattgcatgaagaatctgcttagggttaggcgttttgcgctgcttcgcgatgtacgggccagatatacgcgttgacattgattattgactagttattaatagtaatcaattacggggtcattagttcatagcccatatatggagttccgcgttacataacttacggtaaatggcccgcctggctgaccgcccaacgacccccgcccattgacgtcaataatgacgtatgttcccatagtaacgccaatagggactttccattgacgtcaatgggtggagtatttacggtaaactgcccacttggcagtacatcaagtgtatcatatgccaagtacgccccctattgacgtcaatgacggtaaatggcccgcctggcattatgcccagtacatgaccttatgggactttcctacttggcagtacatctacgtattagtcatcgctattaccatggtgatgcggttttggcagtacatcaatgggcgtggatagcggtttgactcacggggatttccaagtctccaccccattgacgtcaatgggagtttgttttggcaccaaaatcaacgggactttccaaaatgtcgtaacaactccgccccattgacgcaaatgggcggtaggcgtgtacggtgggaggtctatataagcagagctctctggctaactagagaacccactgcttactggcttatcgaaattaatacgactcactatagggagacccaagctggctagcgtttaaacttaagcttggtaccgccaccatgggcccgaaaaagaagcgaaaagttgactacaaggaccacgatggtgattataaagatcatgacatcgactataaagacgatgatgacaagggatccggaatgaaatggtactacaagacagtgaccttcctgcctgctagatgcaacaacgagagcctggccgctaagtgcctgagaatcctgcacggcttcaactacgagtacgaaaccagaaacatcggcgtgtcctttccactgtggagcgactatacaatcggcaacaagattagcttcgtgtctaccaacaaaatcgagctggacctcctgctgaaacaacactacttcacccagatgaaagagctgcactattttgatatcagcaacaccaaggtcgtgcctgatggatgtgaatacgtgtctttcaagcggtgccagagcatcgacaaggccacccctgccggccaggccagaaaagccaagcggctgaagaagcgggccgaggaaagaggcgaggtgttcgacctgagcagcttcaagcagcacgaggttgtggccctgcaccactaccacagcctggaagaggacagcaagagcagaggcggcagcttcagactgaacatcagaacattcaaggaagcccgcctggatggcgacgccctgttcagctcctacggcctggctaataccggcaataagagccagcctgtgcccctgatctgagcggccgctcgagtctagagggcccgtttaaacccgctgatcagcctcgactgtgccttctagttgccagccatctgttgtttgcccctcccccgtgccttccttgaccctggaaggtgccactcccactgtcctttcctaataaaatgaggaaattgcatcgcattgtctgagtaggtgtcattctattctggggggtggggtggggcaggacagcaagggggaggattgggaagacaatagcaggcatgctggggatgcggtgggctctatggcttctgaggcggaaagaaccagctggggctctagggggtatccccacgcgccctgtagcggcgcattaagcgcggcgggtgtggtggttacgcgcagcgtgaccgctacacttgccagcgccctagcgcccgctcctttcgctttcttcccttcctttctcgccacgttcgccggctttccccgtcaagctctaaatcgggggctccctttagggttccgatttagtgctttacggcacctcgaccccaaaaaacttgattagggtgatggttcacgtagtgggccatcgccctgatagacggtttttcgccctttgacgttggagtccacgttctttaatagtggactcttgttccaaactggaacaacactcaaccctatctcggtctattcttttgatttataagggattttgccgatttcggcctattggttaaaaaatgagctgatttaacaaaaatttaacgcgaattaattctgtggaatgtgtgtcagttagggtgtggaaagtccccaggctccccagcaggcagaagtatgcaaagcatgcatctcaattagtcagcaaccaggtgtggaaagtccccaggctccccagcaggcagaagtatgcaaagcatgcatctcaattagtcagcaaccatagtcccgcccctaactccgcccatcccgcccctaactccgcccagttccgcccattctccgccccatggctgactaattttttttatttatgcagaggccgaggccgcctctgcctctgagctattccagaagtagtgaggaggcttttttggaggcctaggcttttgcaaaaagctcccgggagcttgtatatccattttcggatctgatcaagagacaggatgaggatcgtttcgcatgattgaacaagatggattgcacgcaggttctccggccgcttgggtggagaggctattcggctatgactgggcacaacagacaatcggctgctctgatgccgccgtgttccggctgtcagcgcaggggcgcccggttctttttgtcaagaccgacctgtccggtgccctgaatgaactgcaggacgaggcagcgcggctatcgtggctggccacgacgggcgttccttgcgcagctgtgctcgacgttgtcactgaagcgggaagggactggctgctattgggcgaagtgccggggcaggatctcctgtcatctcaccttgctcctgccgagaaagtatccatcatggctgatgcaatgcggcggctgcatacgcttgatccggctacctgcccattcgaccaccaagcgaaacatcgcatcgagcgagcacgtactcggatggaagccggtcttgtcgatcaggatgatctggacgaagagcatcaggggctcgcgccagccgaactgttcgccaggctcaaggcgcgcatgcccgacggcgaggatctcgtcgtgacccatggcgatgcctgcttgccgaatatcatggtggaaaatggccgcttttctggattcatcgactgtggccggctgggtgtggcggaccgctatcaggacatagcgttggctacccgtgatattgctgaagagcttggcggcgaatgggctgaccgcttcctcgtgctttacggtatcgccgctcccgattcgcagcgcatcgccttctatcgccttcttgacgagttcttctgagcgggactctggggttcgaaatgaccgaccaagcgacgcccaacctgccatcacgagatttcgattccaccgccgccttctatgaaaggttgggcttcggaatcgttttccgggacgccggctggatgatcctccagcgcggggatctcatgctggagttcttcgcccaccccaacttgtttattgcagcttataatggttacaaataaagcaatagcatcacaaatttcacaaataaagcatttttttcactgcattctagttgtggtttgtccaaactcatcaatgtatcttatcatgtctgtataccgtcgacctctagctagagcttggcgtaatcatggtcatagctgtttcctgtgtgaaattgttatccgctcacaattccacacaacatacgagccggaagcataaagtgtaaagcctggggtgcctaatgagtgagctaactcacattaattgcgttgcgctcactgcccgctttccagtcgggaaacctgtcgtgccagctgcattaatgaatcggccaacgcgcggggagaggcggtttgcgtattgggcgctcttccgcttcctcgctcactgactcgctgcgctcggtcgttcggctgcggcgagcggtatcagctcactcaaaggcggtaatacggttatccacagaatcaggggataacgcaggaaagaacatgtgagcaaaaggccagcaaaaggccaggaaccgtaaaaaggccgcgttgctggcgtttttccataggctccgcccccctgacgagcatcacaaaaatcgacgctcaagtcagaggtggcgaaacccgacaggactataaagataccaggcgtttccccctggaagctccctcgtgcgctctcctgttccgaccctgccgcttaccggatacctgtccgcctttctcccttcgggaagcgtggcgctttctcatagctcacgctgtaggtatctcagttcggtgtaggtcgttcgctccaagctgggctgtgtgcacgaaccccccgttcagcccgaccgctgcgccttatccggtaactatcgtcttgagtccaacccggtaagacacgacttatcgccactggcagcagccactggtaacaggattagcagagcgaggtatgtaggcggtgctacagagttcttgaagtggtggcctaactacggctacactagaagaacagtatttggtatctgcgctctgctgaagccagttaccttcggaaaaagagttggtagctcttgatccggcaaacaaaccaccgctggtagcggtttttttgtttgcaagcagcagattacgcgcagaaaaaaaggatctcaagaagatcctttgatcttttctacggggtctgacgctcagtggaacgaaaactcacgttaagggattttggtcatgagattatcaaaaaggatcttcacctagatccttttaaattaaaaatgaagttttaaatcaatctaaagtatatatgagtaaacttggtctgacagttaccaatgcttaatcagtgaggcacctatctcagcgatctgtctatttcgttcatccatagttgcctgactccccgtcgtgtagataactacgatacgggagggcttaccatctggccccagtgctgcaatgataccgcgagacccacgctcaccggctccagatttatcagcaataaaccagccagccggaagggccgagcgcagaagtggtcctgcaactttatccgcctccatccagtctattaattgttgccgggaagctagagtaagtagttcgccagttaatagtttgcgcaacgttgttgccattgctacaggcatcgtggtgtcacgctcgtcgtttggtatggcttcattcagctccggttcccaacgatcaaggcgagttacatgatcccccatgttgtgcaaaaaagcggttagctccttcggtcctccgatcgttgtcagaagtaagttggccgcagtgttatcactcatggttatggcagcactgcataattctcttactgtcatgccatccgtaagatgcttttctgtgactggtgagtactcaaccaagtcattctgagaatagtgtatgcggcgaccgagttgctcttgcccggcgtcaatacgggataataccgcgccacatagcagaactttaaaagtgctcatcattggaaaacgttcttcggggcgaaaactctcaaggatcttaccgctgttgagatccagttcgatgtaacccactcgtgcacccaactgatcttcagcatcttttactttcaccagcgtttctgggtgagcaaaaacaggaaggcaaaatgccgcaaaaaagggaataagggcgacacggaaatgttgaatactcatactcttcctttttcaatattattgaagcatttatcagggttattgtctcatgagcggatacatatttgaatgtatttagaaaaataaacaaataggggttccgcgcacatttccccgaaaagtgccacctgacgtc

SEQ ID NO: 117 - DNA, 6111 bp, Artificial Sequence
  Synthetic
gacggatcgggagatctcccgatcccctatggtgcactctcagtacaatctgctctgatgccgcatagttaagccagtatctgctccctgcttgtgtgttggaggtcgctgagtagtgcgcgagcaaaatttaagctacaacaaggcaaggcttgaccgacaattgcatgaagaatctgcttagggttaggcgttttgcgctgcttcgcgatgtacgggccagatatacgcgttgacattgattattgactagttattaatagtaatcaattacggggtcattagttcatagcccatatatggagttccgcgttacataacttacggtaaatggcccgcctggctgaccgcccaacgacccccgcccattgacgtcaataatgacgtatgttcccatagtaacgccaatagggactttccattgacgtcaatgggtggagtatttacggtaaactgcccacttggcagtacatcaagtgtatcatatgccaagtacgccccctattgacgtcaatgacggtaaatggcccgcctggcattatgcccagtacatgaccttatgggactttcctacttggcagtacatctacgtattagtcatcgctattaccatggtgatgcggttttggcagtacatcaatgggcgtggatagcggtttgactcacggggatttccaagtctccaccccattgacgtcaatgggagtttgttttggcaccaaaatcaacgggactttccaaaatgtcgtaacaactccgccccattgacgcaaatgggcggtaggcgtgtacggtgggaggtctatataagcagagctctctggctaactagagaacccactgcttactggcttatcgaaattaatacgactcactatagggagacccaagctggctagcgtttaaacttaagcttggtaccgccaccatgggcccgaaaaagaagcgaaaagttgactacaaggaccacgatggtgattataaagatcatgacatcgactataaagacgatgatgacaagggatccggaatgagccagcggtactactttctgatcagatacaccaacgccaacgctgattacggcctgctggctggcagatgcatctctcagatgcacctgtttatggtcaatcaccaccaggccatgaaccgggtgggagtgtccttcccagactggaatgagagcagcgtgggccaaacaatcgccttcgtgtctgaagataaggagatgatgatcggactgagctttcagccttacttctccctgatggtgaacgagggcctcttcgagatcagcagcgtgtacgaggttcctgacaccagcgccgaggtgaggttcgtgcggaaccaaacaatcggtaagaacttcctgggctctaagaaacgcagaatcaagcggagcatggccagagctgaactgttcggcgtggaacagagcctgcccgtgaccaatgaagatagagtgatcgacagcttccacagaattcctatcagctccggcagcagcagacaggacttcatcctgtttatccagaaagaactggccgacgagagagccaagtctggcttcaacagctacggattcgccaccaaccaggagaagagagccacagtgcccgacctgagattcaacctgttcgaggaagatagcttctgagcggccgctcgagtctagagggcccgtttaaacccgctgatcagcctcgactgtgccttctagttgccagccatctgttgtttgcccctcccccgtgccttccttgaccctggaaggtgccactcccactgtcctttcctaataaaatgaggaaattgcatcgcattgtctgagtaggtgtcattctattctggggggtggggtggggcaggacagcaagggggaggattgggaagacaatagcaggcatgctggggatgcggtgggctctatggcttctgaggcggaaagaaccagctggggctctagggggtatccccacgcgccctgtagcggcgcattaagcgcggcgggtgtggtggttacgcgcagcgtgaccgctacacttgccagcgccctagcgcccgctcctttcgctttcttcccttcctttctcgccacgttcgccggctttccccgtcaagctctaaatcgggggctccctttagggttccgatttagtgctttacggcacctcgaccccaaaaaacttgattagggtgatggttcacgtagtgggccatcgccctgatagacggtttttcgccctttgacgttggagtccacgttctttaatagtggactcttgttccaaactggaacaacactcaaccctatctcggtctattcttttgatttataagggattttgccgatttcggcctattggttaaaaaatgagctgatttaacaaaaatttaacgcgaattaattctgtggaatgtgtgtcagttagggtgtggaaagtccccaggctccccagcaggcagaagtatgcaaagcatgcatctcaattagtcagcaaccaggtgtggaaagtccccaggctccccagcaggcagaagtatgcaaagcatgcatctcaattagtcagcaaccatagtcccgcccctaactccgcccatcccgcccctaactccgcccagttccgcccattctccgccccatggctgactaattttttttatttatgcagaggccgaggccgcctctgcctctgagctattccagaagtagtgaggaggcttttttggaggcctaggcttttgcaaaaagctcccgggagcttgtatatccattttcggatctgatcaagagacaggatgaggatcgtttcgcatgattgaacaagatggattgcacgcaggttctccggccgcttgggtggagaggctattcggctatgactgggcacaacagacaatcggctgctctgatgccgccgtgttccggctgtcagcgcaggggcgcccggttctttttgtcaagaccgacctgtccggtgccctgaatgaactgcaggacgaggcagcgcggctatcgtggctggccacgacgggcgttccttgcgcagctgtgctcgacgttgtcactgaagcgggaagggactggctgctattgggcgaagtgccggggcaggatctcctgtcatctcaccttgctcctgccgagaaagtatccatcatggctgatgcaatgcggcggctgcatacgcttgatccggctacctgcccattcgaccaccaagcgaaacatcgcatcgagcgagcacgtactcggatggaagccggtcttgtcgatcaggatgatctggacgaagagcatcaggggctcgcgccagccgaactgttcgccaggctcaaggcgcgcatgcccgacggcgaggatctcgtcgtgacccatggcgatgcctgcttgccgaatatcatggtggaaaatggccgcttttctggattcatcgactgtggccggctgggtgtggcggaccgctatcaggacatagcgttggctacccgtgatattgctgaagagcttggcggcgaatgggctgaccgcttcctcgtgctttacggtatcgccgctcccgattcgcagcgcatcgccttctatcgccttcttgacgagttcttctgagcgggactctggggttcgaaatgaccgaccaagcgacgcccaacctgccatcacgagatttcgattccaccgccgccttctatgaaaggttgggcttcggaatcgttttccgggacgccggctggatgatcctccagcgcggggatctcatgctggagttcttcgcccaccccaacttgtttattgcagcttataatggttacaaataaagcaatagcatcacaaatttcacaaataaagcatttttttcactgcattctagttgtggtttgtccaaactcatcaatgtatcttatcatgtctgtataccgtcgacctctagctagagcttggcgtaatcatggtcatagctgtttcctgtgtgaaattgttatccgctcacaattccacacaacatacgagccggaagcataaagtgtaaagcctggggtgcctaatgagtgagctaactcacattaattgcgttgcgctcactgcccgctttccagtcgggaaacctgtcgtgccagctgcattaatgaatcggccaacgcgcggggagaggcggtttgcgtattgggcgctcttccgcttcctcgctcactgactcgctgcgctcggtcgttcggctgcggcgagcggtatcagctcactcaaaggcggtaatacggttatccacagaatcaggggataacgcaggaaagaacatgtgagcaaaaggccagcaaaaggccaggaaccgtaaaaaggccgcgttgctggcgtttttccataggctccgcccccctgacgagcatcacaaaaatcgacgctcaagtcagaggtggcgaaacccgacaggactataaagataccaggcgtttccccctggaagctccctcgtgcgctctcctgttccgaccctgccgcttaccggatacctgtccgcctttctcccttcgggaagcgtggcgctttctcatagctcacgctgtaggtatctcagttcggtgtaggtcgttcgctccaagctgggctgtgtgcacgaaccccccgttcagcccgaccgctgcgccttatccggtaactatcgtcttgagtccaacccggtaagacacgacttatcgccactggcagcagccactggtaacaggattagcagagcgaggtatgtaggcggtgctacagagttcttgaagtggtggcctaactacggctacactagaagaacagtatttggtatctgcgctctgctgaagccagttaccttcggaaaaagagttggtagctcttgatccggcaaacaaaccaccgctggtagcggtttttttgtttgcaagcagcagattacgcgcagaaaaaaaggatctcaagaagatcctttgatcttttctacggggtctgacgctcagtggaacgaaaactcacgttaagggattttggtcatgagattatcaaaaaggatcttcacctagatccttttaaattaaaaatgaagttttaaatcaatctaaagtatatatgagtaaacttggtctgacagttaccaatgcttaatcagtgaggcacctatctcagcgatctgtctatttcgttcatccatagttgcctgactccccgtcgtgtagataactacgatacgggagggcttaccatctggccccagtgctgcaatgataccgcgagacccacgctcaccggctccagatttatcagcaataaaccagccagccggaagggccgagcgcagaagtggtcctgcaactttatccgcctccatccagtctattaattgttgccgggaagctagagtaagtagttcgccagttaatagtttgcgcaacgttgttgccattgctacaggcatcgtggtgtcacgctcgtcgtttggtatggcttcattcagctccggttcccaacgatcaaggcgagttacatgatcccccatgttgtgcaaaaaagcggttagctccttcggtcctccgatcgttgtcagaagtaagttggccgcagtgttatcactcatggttatggcagcactgcataattctcttactgtcatgccatccgtaagatgcttttctgtgactggtgagtactcaaccaagtcattctgagaatagtgtatgcggcgaccgagttgctcttgcccggcgtcaatacgggataataccgcgccacatagcagaactttaaaagtgctcatcattggaaaacgttcttcggggcgaaaactctcaaggatcttaccgctgttgagatccagttcgatgtaacccactcgtgcacccaactgatcttcagcatcttttactttcaccagcgtttctgggtgagcaaaaacaggaaggcaaaatgccgcaaaaaagggaataagggcgacacggaaatgttgaatactcatactcttcctttttcaatattattgaagcatttatcagggttattgtctcatgagcggatacatatttgaatgtatttagaaaaataaacaaataggggttccgcgcacatttccccgaaaagtgccacctgacgtc

SEQ ID NO: 118 - DNA, 6087 bp, Artificial Sequence
  Synthetic
gacggatcgggagatctcccgatcccctatggtgcactctcagtacaatctgctctgatgccgcatagttaagccagtatctgctccctgcttgtgtgttggaggtcgctgagtagtgcgcgagcaaaatttaagctacaacaaggcaaggcttgaccgacaattgcatgaagaatctgcttagggttaggcgttttgcgctgcttcgcgatgtacgggccagatatacgcgttgacattgattattgactagttattaatagtaatcaattacggggtcattagttcatagcccatatatggagttccgcgttacataacttacggtaaatggcccgcctggctgaccgcccaacgacccccgcccattgacgtcaataatgacgtatgttcccatagtaacgccaatagggactttccattgacgtcaatgggtggagtatttacggtaaactgcccacttggcagtacatcaagtgtatcatatgccaagtacgccccctattgacgtcaatgacggtaaatggcccgcctggcattatgcccagtacatgaccttatgggactttcctacttggcagtacatctacgtattagtcatcgctattaccatggtgatgcggttttggcagtacatcaatgggcgtggatagcggtttgactcacggggatttccaagtctccaccccattgacgtcaatgggagtttgttttggcaccaaaatcaacgggactttccaaaatgtcgtaacaactccgccccattgacgcaaatgggcggtaggcgtgtacggtgggaggtctatataagcagagctctctggctaactagagaacccactgcttactggcttatcgaaattaatacgactcactatagggagacccaagctggctagcgtttaaacttaagcttggtaccgccaccatgggcccgaaaaagaagcgaaaagttgactacaaggaccacgatggtgattataaagatcatgacatcgactataaagacgatgatgacaagggatccggaatgaccaccagatactacttctgcattagatatacacctgtgcaggccgactacgagctgctggccggcagatgtatcagccagatgcatctgtttatggtcaacaacagacaggctatcaacaagatcggcgtgtcctttccagattggtccgacgtgaccgtgggccagaccatcgccttcgtggccgaagataaggaaatgatggtgggactgtcttttcagccttacttcagcctgatggttaacgaaggcctgttcgagatcagcagcgtgtgcgaggtgcctgatacagccatcgaggtgcggttcacccggaaccagacaatcggaaagagcttcctgggcagcaagaagcggagaatcaagaggtccatggccagagccgagctgagcggagtcgagcccagcctgcctgccaccaacgaggaaagagtgatcgacagcttccacagaatccctatctcttctggatctagcggcgaggactacatgctgttcgtgcaaaaggaattcgtgggcgaacggggcacagctaatttcaacagctacggcctcgctaccaatcaggagcgcaagggcaccgtgcccgagctgagattctgagcggccgctcgagtctagagggcccgtttaaacccgctgatcagcctcgactgtgccttctagttgccagccatctgttgtttgcccctcccccgtgccttccttgaccctggaaggtgccactcccactgtcctttcctaataaaatgaggaaattgcatcgcattgtctgagtaggtgtcattctattctggggggtggggtggggcaggacagcaagggggaggattgggaagacaatagcaggcatgctggggatgcggtgggctctatggcttctgaggcggaaagaaccagctggggctctagggggtatccccacgcgccctgtagcggcgcattaagcgcggcgggtgtggtggttacgcgcagcgtgaccgctacacttgccagcgccctagcgcccgctcctttcgctttcttcccttcctttctcgccacgttcgccggctttccccgtcaagctctaaatcgggggctccctttagggttccgatttagtgctttacggcacctcgaccccaaaaaacttgattagggtgatggttcacgtagtgggccatcgccctgatagacggtttttcgccctttgacgttggagtccacgttctttaatagtggactcttgttccaaactggaacaacactcaaccctatctcggtctattcttttgatttataagggattttgccgatttcggcctattggttaaaaaatgagctgatttaacaaaaatttaacgcgaattaattctgtggaatgtgtgtcagttagggtgtggaaagtccccaggctccccagcaggcagaagtatgcaaagcatgcatctcaattagtcagcaaccaggtgtggaaagtccccaggctccccagcaggcagaagtatgcaaagcatgcatctcaattagtcagcaaccatagtcccgcccctaactccgcccatcccgcccctaactccgcccagttccgcccattctccgccccatggctgactaattttttttatttatgcagaggccgaggccgcctctgcctctgagctattccagaagtagtgaggaggcttttttggaggcctaggcttttgcaaaaagctcccgggagcttgtatatccattttcggatctgatcaagagacaggatgaggatcgtttcgcatgattgaacaagatggattgcacgcaggttctccggccgcttgggtggagaggctattcggctatgactgggcacaacagacaatcggctgctctgatgccgccgtgttccggctgtcagcgcaggggcgcccggttctttttgtcaagaccgacctgtccggtgccctgaatgaactgcaggacgaggcagcgcggctatcgtggctggccacgacgggcgttccttgcgcagctgtgctcgacgttgtcactgaagcgggaagggactggctgctattgggcgaagtgccggggcaggatctcctgtcatctcaccttgctcctgccgagaaagtatccatcatggctgatgcaatgcggcggctgcatacgcttgatccggctacctgcccattcgaccaccaagcgaaacatcgcatcgagcgagcacgtactcggatggaagccggtcttgtcgatcaggatgatctggacgaagagcatcaggggctcgcgccagccgaactgttcgccaggctcaaggcgcgcatgcccgacggcgaggatctcgtcgtgacccatggcgatgcctgcttgccgaatatcatggtggaaaatggccgcttttctggattcatcgactgtggccggctgggtgtggcggaccgctatcaggacatagcgttggctacccgtgatattgctgaagagcttggcggcgaatgggctgaccgcttcctcgtgctttacggtatcgccgctcccgattcgcagcgcatcgccttctatcgccttcttgacgagttcttctgagcgggactctggggttcgaaatgaccgaccaagcgacgcccaacctgccatcacgagatttcgattccaccgccgccttctatgaaaggttgggcttcggaatcgttttccgggacgccggctggatgatcctccagcgcggggatctcatgctggagttcttcgcccaccccaacttgtttattgcagcttataatggttacaaataaagcaatagcatcacaaatttcacaaataaagcatttttttcactgcattctagttgtggtttgtccaaactcatcaatgtatcttatcatgtctgtataccgtcgacctctagctagagcttggcgtaatcatggtcatagctgtttcctgtgtgaaattgttatccgctcacaattccacacaacatacgagccggaagcataaagtgtaaagcctggggtgcctaatgagtgagctaactcacattaattgcgttgcgctcactgcccgctttccagtcgggaaacctgtcgtgccagctgcattaatgaatcggccaacgcgcggggagaggcggtttgcgtattgggcgctcttccgcttcctcgctcactgactcgctgcgctcggtcgttcggctgcggcgagcggtatcagctcactcaaaggcggtaatacggttatccacagaatcaggggataacgcaggaaagaacatgtgagcaaaaggccagcaaaaggccaggaaccgtaaaaaggccgcgttgctggcgtttttccataggctccgcccccctgacgagcatcacaaaaatcgacgctcaagtcagaggtggcgaaacccgacaggactataaagataccaggcgtttccccctggaagctccctcgtgcgctctcctgttccgaccctgccgcttaccggatacctgtccgcctttctcccttcgggaagcgtggcgctttctcatagctcacgctgtaggtatctcagttcggtgtaggtcgttcgctccaagctgggctgtgtgcacgaaccccccgttcagcccgaccgctgcgccttatccggtaactatcgtcttgagtccaacccggtaagacacgacttatcgccactggcagcagccactggtaacaggattagcagagcgaggtatgtaggcggtgctacagagttcttgaagtggtggcctaactacggctacactagaagaacagtatttggtatctgcgctctgctgaagccagttaccttcggaaaaagagttggtagctcttgatccggcaaacaaaccaccgctggtagcggtttttttgtttgcaagcagcagattacgcgcagaaaaaaaggatctcaagaagatcctttgatcttttctacggggtctgacgctcagtggaacgaaaactcacgttaagggattttggtcatgagattatcaaaaaggatcttcacctagatccttttaaattaaaaatgaagttttaaatcaatctaaagtatatatgagtaaacttggtctgacagttaccaatgcttaatcagtgaggcacctatctcagcgatctgtctatttcgttcatccatagttgcctgactccccgtcgtgtagataactacgatacgggagggcttaccatctggccccagtgctgcaatgataccgcgagacccacgctcaccggctccagatttatcagcaataaaccagccagccggaagggccgagcgcagaagtggtcctgcaactttatccgcctccatccagtctattaattgttgccgggaagctagagtaagtagttcgccagttaatagtttgcgcaacgttgttgccattgctacaggcatcgtggtgtcacgctcgtcgtttggtatggcttcattcagctccggttcccaacgatcaaggcgagttacatgatcccccatgttgtgcaaaaaagcggttagctccttcggtcctccgatcgttgtcagaagtaagttggccgcagtgttatcactcatggttatggcagcactgcataattctcttactgtcatgccatccgtaagatgcttttctgtgactggtgagtactcaaccaagtcattctgagaatagtgtatgcggcgaccgagttgctcttgcccggcgtcaatacgggataataccgcgccacatagcagaactttaaaagtgctcatcattggaaaacgttcttcggggcgaaaactctcaaggatcttaccgctgttgagatccagttcgatgtaacccactcgtgcacccaactgatcttcagcatcttttactttcaccagcgtttctgggtgagcaaaaacaggaaggcaaaatgccgcaaaaaagggaataagggcgacacggaaatgttgaatactcatactcttcctttttcaatattattgaagcatttatcagggttattgtctcatgagcggatacatatttgaatgtatttagaaaaataaacaaataggggttccgcgcacatttccccgaaaagtgccacctgacgtc

SEQ ID NO: 119 - DNA, 6123 bp, Artificial Sequence
  Synthetic
gacggatcgggagatctcccgatcccctatggtgcactctcagtacaatctgctctgatgccgcatagttaagccagtatctgctccctgcttgtgtgttggaggtcgctgagtagtgcgcgagcaaaatttaagctacaacaaggcaaggcttgaccgacaattgcatgaagaatctgcttagggttaggcgttttgcgctgcttcgcgatgtacgggccagatatacgcgttgacattgattattgactagttattaatagtaatcaattacggggtcattagttcatagcccatatatggagttccgcgttacataacttacggtaaatggcccgcctggctgaccgcccaacgacccccgcccattgacgtcaataatgacgtatgttcccatagtaacgccaatagggactttccattgacgtcaatgggtggagtatttacggtaaactgcccacttggcagtacatcaagtgtatcatatgccaagtacgccccctattgacgtcaatgacggtaaatggcccgcctggcattatgcccagtacatgaccttatgggactttcctacttggcagtacatctacgtattagtcatcgctattaccatggtgatgcggttttggcagtacatcaatgggcgtggatagcggtttgactcacggggatttccaagtctccaccccattgacgtcaatgggagtttgttttggcaccaaaatcaacgggactttccaaaatgtcgtaacaactccgccccattgacgcaaatgggcggtaggcgtgtacggtgggaggtctatataagcagagctctctggctaactagagaacccactgcttactggcttatcgaaattaatacgactcactatagggagacccaagctggctagcgtttaaacttaagcttggtaccgccaccatgggcccgaaaaagaagcgaaaagttgactacaaggaccacgatggtgattataaagatcatgacatcgactataaagacgatgatgacaagggatccggaatgctgacccactacttctctatcacctacgtgcccgacgattgcgacaatgaactgctggctggcagatgtatcgccgaatttcacaagttcattagcagcctgcggctgatcgagaacaattcttttgccatcggcttccccaattggtccgagcagagcatcggaaatgaattcgccattttcagcgacaacagcgagctgctcagcgccatcaagtaccagccttactttaacctgatgaaaagcgaagagctgttcagcatcaccgacatcaagcctgtgcctaacaacctgcctcagatcagattcatccggaaccagagcatcggcaaaatcttcatcggaagcaaaaagcggagaatccagcgctccatcacaagaaacaacaaggaacacacaccaatcagcaacgaggatagagagttcgacaccttccataaggtgtcctgcagcagcaagagcaaacagcaacagttcatcctgcacatccaaaaggacatcacccctagaaccacagattctaacgactcttacaacagctacggcctggccacaaactctaagcacctgggcaccgtgcctgacctgtccaaaatccccttctactgcgaggacaagctgagcaacaaggaccagtgagcggccgctcgagtctagagggcccgtttaaacccgctgatcagcctcgactgtgccttctagttgccagccatctgttgtttgcccctcccccgtgccttccttgaccctggaaggtgccactcccactgtcctttcctaataaaatgaggaaattgcatcgcattgtctgagtaggtgtcattctattctggggggtggggtggggcaggacagcaagggggaggattgggaagacaatagcaggcatgctggggatgcggtgggctctatggcttctgaggcggaaagaaccagctggggctctagggggtatccccacgcgccctgtagcggcgcattaagcgcggcgggtgtggtggttacgcgcagcgtgaccgctacacttgccagcgccctagcgcccgctcctttcgctttcttcccttcctttctcgccacgttcgccggctttccccgtcaagctctaaatcgggggctccctttagggttccgatttagtgctttacggcacctcgaccccaaaaaacttgattagggtgatggttcacgtagtgggccatcgccctgatagacggtttttcgccctttgacgttggagtccacgttctttaatagtggactcttgttccaaactggaacaacactcaaccctatctcggtctattcttttgatttataagggattttgccgatttcggcctattggttaaaaaatgagctgatttaacaaaaatttaacgcgaattaattctgtggaatgtgtgtcagttagggtgtggaaagtccccaggctccccagcaggcagaagtatgcaaagcatgcatctcaattagtcagcaaccaggtgtggaaagtccccaggctccccagcaggcagaagtatgcaaagcatgcatctcaattagtcagcaaccatagtcccgcccctaactccgcccatcccgcccctaactccgcccagttccgcccattctccgccccatggctgactaattttttttatttatgcagaggccgaggccgcctctgcctctgagctattccagaagtagtgaggaggcttttttggaggcctaggcttttgcaaaaagctcccgggagcttgtatatccattttcggatctgatcaagagacaggatgaggatcgtttcgcatgattgaacaagatggattgcacgcaggttctccggccgcttgggtggagaggctattcggctatgactgggcacaacagacaatcggctgctctgatgccgccgtgttccggctgtcagcgcaggggcgcccggttctttttgtcaagaccgacctgtccggtgccctgaatgaactgcaggacgaggcagcgcggctatcgtggctggccacgacgggcgttccttgcgcagctgtgctcgacgttgtcactgaagcgggaagggactggctgctattgggcgaagtgccggggcaggatctcctgtcatctcaccttgctcctgccgagaaagtatccatcatggctgatgcaatgcggcggctgcatacgcttgatccggctacctgcccattcgaccaccaagcgaaacatcgcatcgagcgagcacgtactcggatggaagccggtcttgtcgatcaggatgatctggacgaagagcatcaggggctcgcgccagccgaactgttcgccaggctcaaggcgcgcatgcccgacggcgaggatctcgtcgtgacccatggcgatgcctgcttgccgaatatcatggtggaaaatggccgcttttctggattcatcgactgtggccggctgggtgtggcggaccgctatcaggacatagcgttggctacccgtgatattgctgaagagcttggcggcgaatgggctgaccgcttcctcgtgctttacggtatcgccgctcccgattcgcagcgcatcgccttctatcgccttcttgacgagttcttctgagcgggactctggggttcgaaatgaccgaccaagcgacgcccaacctgccatcacgagatttcgattccaccgccgccttctatgaaaggttgggcttcggaatcgttttccgggacgccggctggatgatcctccagcgcggggatctcatgctggagttcttcgcccaccccaacttgtttattgcagcttataatggttacaaataaagcaatagcatcacaaatttcacaaataaagcatttttttcactgcattctagttgtggtttgtccaaactcatcaatgtatcttatcatgtctgtataccgtcgacctctagctagagcttggcgtaatcatggtcatagctgtttcctgtgtgaaattgttatccgctcacaattccacacaacatacgagccggaagcataaagtgtaaagcctggggtgcctaatgagtgagctaactcacattaattgcgttgcgctcactgcccgctttccagtcgggaaacctgtcgtgccagctgcattaatgaatcggccaacgcgcggggagaggcggtttgcgtattgggcgctcttccgcttcctcgctcactgactcgctgcgctcggtcgttcggctgcggcgagcggtatcagctcactcaaaggcggtaatacggttatccacagaatcaggggataacgcaggaaagaacatgtgagcaaaaggccagcaaaaggccaggaaccgtaaaaaggccgcgttgctggcgtttttccataggctccgcccccctgacgagcatcacaaaaatcgacgctcaagtcagaggtggcgaaacccgacaggactataaagataccaggcgtttccccctggaagctccctcgtgcgctctcctgttccgaccctgccgcttaccggatacctgtccgcctttctcccttcgggaagcgtggcgctttctcatagctcacgctgtaggtatctcagttcggtgtaggtcgttcgctccaagctgggctgtgtgcacgaaccccccgttcagcccgaccgctgcgccttatccggtaactatcgtcttgagtccaacccggtaagacacgacttatcgccactggcagcagccactggtaacaggattagcagagcgaggtatgtaggcggtgctacagagttcttgaagtggtggcctaactacggctacactagaagaacagtatttggtatctgcgctctgctgaagccagttaccttcggaaaaagagttggtagctcttgatccggcaaacaaaccaccgctggtagcggtttttttgtttgcaagcagcagattacgcgcagaaaaaaaggatctcaagaagatcctttgatcttttctacggggtctgacgctcagtggaacgaaaactcacgttaagggattttggtcatgagattatcaaaaaggatcttcacctagatccttttaaattaaaaatgaagttttaaatcaatctaaagtatatatgagtaaacttggtctgacagttaccaatgcttaatcagtgaggcacctatctcagcgatctgtctatttcgttcatccatagttgcctgactccccgtcgtgtagataactacgatacgggagggcttaccatctggccccagtgctgcaatgataccgcgagacccacgctcaccggctccagatttatcagcaataaaccagccagccggaagggccgagcgcagaagtggtcctgcaactttatccgcctccatccagtctattaattgttgccgggaagctagagtaagtagttcgccagttaatagtttgcgcaacgttgttgccattgctacaggcatcgtggtgtcacgctcgtcgtttggtatggcttcattcagctccggttcccaacgatcaaggcgagttacatgatcccccatgttgtgcaaaaaagcggttagctccttcggtcctccgatcgttgtcagaagtaagttggccgcagtgttatcactcatggttatggcagcactgcataattctcttactgtcatgccatccgtaagatgcttttctgtgactggtgagtactcaaccaagtcattctgagaatagtgtatgcggcgaccgagttgctcttgcccggcgtcaatacgggataataccgcgccacatagcagaactttaaaagtgctcatcattggaaaacgttcttcggggcgaaaactctcaaggatcttaccgctgttgagatccagttcgatgtaacccactcgtgcacccaactgatcttcagcatcttttactttcaccagcgtttctgggtgagcaaaaacaggaaggcaaaatgccgcaaaaaagggaataagggcgacacggaaatgttgaatactcatactcttcctttttcaatattattgaagcatttatcagggttattgtctcatgagcggatacatatttgaatgtatttagaaaaataaacaaataggggttccgcgcacatttccccgaaaagtgccacctgacgtc

SEQ ID NO: 120 - DNA, 6081 bp, Artificial Sequence
  Synthetic
gacggatcgggagatctcccgatcccctatggtgcactctcagtacaatctgctctgatgccgcatagttaagccagtatctgctccctgcttgtgtgttggaggtcgctgagtagtgcgcgagcaaaatttaagctacaacaaggcaaggcttgaccgacaattgcatgaagaatctgcttagggttaggcgttttgcgctgcttcgcgatgtacgggccagatatacgcgttgacattgattattgactagttattaatagtaatcaattacggggtcattagttcatagcccatatatggagttccgcgttacataacttacggtaaatggcccgcctggctgaccgcccaacgacccccgcccattgacgtcaataatgacgtatgttcccatagtaacgccaatagggactttccattgacgtcaatgggtggagtatttacggtaaactgcccacttggcagtacatcaagtgtatcatatgccaagtacgccccctattgacgtcaatgacggtaaatggcccgcctggcattatgcccagtacatgaccttatgggactttcctacttggcagtacatctacgtattagtcatcgctattaccatggtgatgcggttttggcagtacatcaatgggcgtggatagcggtttgactcacggggatttccaagtctccaccccattgacgtcaatgggagtttgttttggcaccaaaatcaacgggactttccaaaatgtcgtaacaactccgccccattgacgcaaatgggcggtaggcgtgtacggtgggaggtctatataagcagagctctctggctaactagagaacccactgcttactggcttatcgaaattaatacgactcactatagggagacccaagctggctagcgtttaaacttaagcttggtaccgccaccatgggcccgaaaaagaagcgaaaagttgactacaaggaccacgatggtgattataaagatcatgacatcgactataaagacgatgatgacaagggatccggaatgcggagctacttctacatcacctacctgcctgagaacgttaacaacgagctgctggccgctagatgtgtgaacgtgctgcacggcttcgtggccaaggaagatgtggtggacatcggcatcagcttccctgcctggtccgagcacacagtgggcaaccagctggctttcgtgtccacatctaaaagcaagctgacaagaatcctgcaccacaactacttcagcatgatgaaagaagatggactgttctacatttctaatatcgagcctgtccccaccggcctcaaggaaatccaatttctgagaaacaacaccatcgccaagacaaccctgggagaaaagaggcggagaaacaagcgggcctttgagagagccgaggccagaggcgacgagtacgcccctgtgcagaacaatcaggcccagttcatccacaattaccacatcctgaactgcaccagcggaagcaagaacatgtcttttccactgtacatccagaagcgggaagacaccagccaccagaattgcgacttcaaccactacggcctggccagcaacaagctgtacagcggcaccgtgcccgagttcaacttcgaccagtgagcggccgctcgagtctagagggcccgtttaaacccgctgatcagcctcgactgtgccttctagttgccagccatctgttgtttgcccctcccccgtgccttccttgaccctggaaggtgccactcccactgtcctttcctaataaaatgaggaaattgcatcgcattgtctgagtaggtgtcattctattctggggggtggggtggggcaggacagcaagggggaggattgggaagacaatagcaggcatgctggggatgcggtgggctctatggcttctgaggcggaaagaaccagctggggctctagggggtatccccacgcgccctgtagcggcgcattaagcgcggcgggtgtggtggttacgcgcagcgtgaccgctacacttgccagcgccctagcgcccgctcctttcgctttcttcccttcctttctcgccacgttcgccggctttccccgtcaagctctaaatcgggggctccctttagggttccgatttagtgctttacggcacctcgaccccaaaaaacttgattagggtgatggttcacgtagtgggccatcgccctgatagacggtttttcgccctttgacgttggagtccacgttctttaatagtggactcttgttccaaactggaacaacactcaaccctatctcggtctattcttttgatttataagggattttgccgatttcggcctattggttaaaaaatgagctgatttaacaaaaatttaacgcgaattaattctgtggaatgtgtgtcagttagggtgtggaaagtccccaggctccccagcaggcagaagtatgcaaagcatgcatctcaattagtcagcaaccaggtgtggaaagtccccaggctccccagcaggcagaagtatgcaaagcatgcatctcaattagtcagcaaccatagtcccgcccctaactccgcccatcccgcccctaactccgcccagttccgcccattctccgccccatggctgactaattttttttatttatgcagaggccgaggccgcctctgcctctgagctattccagaagtagtgaggaggcttttttggaggcctaggcttttgcaaaaagctcccgggagcttgtatatccattttcggatctgatcaagagacaggatgaggatcgtttcgcatgattgaacaagatggattgcacgcaggttctccggccgcttgggtggagaggctattcggctatgactgggcacaacagacaatcggctgctctgatgccgccgtgttccggctgtcagcgcaggggcgcccggttctttttgtcaagaccgacctgtccggtgccctgaatgaactgcaggacgaggcagcgcggctatcgtggctggccacgacgggcgttccttgcgcagctgtgctcgacgttgtcactgaagcgggaagggactggctgctattgggcgaagtgccggggcaggatctcctgtcatctcaccttgctcctgccgagaaagtatccatcatggctgatgcaatgcggcggctgcatacgcttgatccggctacctgcccattcgaccaccaagcgaaacatcgcatcgagcgagcacgtactcggatggaagccggtcttgtcgatcaggatgatctggacgaagagcatcaggggctcgcgccagccgaactgttcgccaggctcaaggcgcgcatgcccgacggcgaggatctcgtcgtgacccatggcgatgcctgcttgccgaatatcatggtggaaaatggccgcttttctggattcatcgactgtggccggctgggtgtggcggaccgctatcaggacatagcgttggctacccgtgatattgctgaagagcttggcggcgaatgggctgaccgcttcctcgtgctttacggtatcgccgctcccgattcgcagcgcatcgccttctatcgccttcttgacgagttcttctgagcgggactctggggttcgaaatgaccgaccaagcgacgcccaacctgccatcacgagatttcgattccaccgccgccttctatgaaaggttgggcttcggaatcgttttccgggacgccggctggatgatcctccagcgcggggatctcatgctggagttcttcgcccaccccaacttgtttattgcagcttataatggttacaaataaagcaatagcatcacaaatttcacaaataaagcatttttttcactgcattctagttgtggtttgtccaaactcatcaatgtatcttatcatgtctgtataccgtcgacctctagctagagcttggcgtaatcatggtcatagctgtttcctgtgtgaaattgttatccgctcacaattccacacaacatacgagccggaagcataaagtgtaaagcctggggtgcctaatgagtgagctaactcacattaattgcgttgcgctcactgcccgctttccagtcgggaaacctgtcgtgccagctgcattaatgaatcggccaacgcgcggggagaggcggtttgcgtattgggcgctcttccgcttcctcgctcactgactcgctgcgctcggtcgttcggctgcggcgagcggtatcagctcactcaaaggcggtaatacggttatccacagaatcaggggataacgcaggaaagaacatgtgagcaaaaggccagcaaaaggccaggaaccgtaaaaaggccgcgttgctggcgtttttccataggctccgcccccctgacgagcatcacaaaaatcgacgctcaagtcagaggtggcgaaacccgacaggactataaagataccaggcgtttccccctggaagctccctcgtgcgctctcctgttccgaccctgccgcttaccggatacctgtccgcctttctcccttcgggaagcgtggcgctttctcatagctcacgctgtaggtatctcagttcggtgtaggtcgttcgctccaagctgggctgtgtgcacgaaccccccgttcagcccgaccgctgcgccttatccggtaactatcgtcttgagtccaacccggtaagacacgacttatcgccactggcagcagccactggtaacaggattagcagagcgaggtatgtaggcggtgctacagagttcttgaagtggtggcctaactacggctacactagaagaacagtatttggtatctgcgctctgctgaagccagttaccttcggaaaaagagttggtagctcttgatccggcaaacaaaccaccgctggtagcggtttttttgtttgcaagcagcagattacgcgcagaaaaaaaggatctcaagaagatcctttgatcttttctacggggtctgacgctcagtggaacgaaaactcacgttaagggattttggtcatgagattatcaaaaaggatcttcacctagatccttttaaattaaaaatgaagttttaaatcaatctaaagtatatatgagtaaacttggtctgacagttaccaatgcttaatcagtgaggcacctatctcagcgatctgtctatttcgttcatccatagttgcctgactccccgtcgtgtagataactacgatacgggagggcttaccatctggccccagtgctgcaatgataccgcgagacccacgctcaccggctccagatttatcagcaataaaccagccagccggaagggccgagcgcagaagtggtcctgcaactttatccgcctccatccagtctattaattgttgccgggaagctagagtaagtagttcgccagttaatagtttgcgcaacgttgttgccattgctacaggcatcgtggtgtcacgctcgtcgtttggtatggcttcattcagctccggttcccaacgatcaaggcgagttacatgatcccccatgttgtgcaaaaaagcggttagctccttcggtcctccgatcgttgtcagaagtaagttggccgcagtgttatcactcatggttatggcagcactgcataattctcttactgtcatgccatccgtaagatgcttttctgtgactggtgagtactcaaccaagtcattctgagaatagtgtatgcggcgaccgagttgctcttgcccggcgtcaatacgggataataccgcgccacatagcagaactttaaaagtgctcatcattggaaaacgttcttcggggcgaaaactctcaaggatcttaccgctgttgagatccagttcgatgtaacccactcgtgcacccaactgatcttcagcatcttttactttcaccagcgtttctgggtgagcaaaaacaggaaggcaaaatgccgcaaaaaagggaataagggcgacacggaaatgttgaatactcatactcttcctttttcaatattattgaagcatttatcagggttattgtctcatgagcggatacatatttgaatgtatttagaaaaataaacaaataggggttccgcgcacatttccccgaaaagtgccacctgacgtc

SEQ ID NO: 121 - DNA, 6093 bp, Artificial Sequence
  Synthetic
gacggatcgggagatctcccgatcccctatggtgcactctcagtacaatctgctctgatgccgcatagttaagccagtatctgctccctgcttgtgtgttggaggtcgctgagtagtgcgcgagcaaaatttaagctacaacaaggcaaggcttgaccgacaattgcatgaagaatctgcttagggttaggcgttttgcgctgcttcgcgatgtacgggccagatatacgcgttgacattgattattgactagttattaatagtaatcaattacggggtcattagttcatagcccatatatggagttccgcgttacataacttacggtaaatggcccgcctggctgaccgcccaacgacccccgcccattgacgtcaataatgacgtatgttcccatagtaacgccaatagggactttccattgacgtcaatgggtggagtatttacggtaaactgcccacttggcagtacatcaagtgtatcatatgccaagtacgccccctattgacgtcaatgacggtaaatggcccgcctggcattatgcccagtacatgaccttatgggactttcctacttggcagtacatctacgtattagtcatcgctattaccatggtgatgcggttttggcagtacatcaatgggcgtggatagcggtttgactcacggggatttccaagtctccaccccattgacgtcaatgggagtttgttttggcaccaaaatcaacgggactttccaaaatgtcgtaacaactccgccccattgacgcaaatgggcggtaggcgtgtacggtgggaggtctatataagcagagctctctggctaactagagaacccactgcttactggcttatcgaaattaatacgactcactatagggagacccaagctggctagcgtttaaacttaagcttggtaccgccaccatgggcccgaaaaagaagcgaaaagttgactacaaggaccacgatggtgattataaagatcatgacatcgactataaagacgatgatgacaagggatccggaatgcagagatactactttaccgtgcatttcctgcctaaacaagccaatctggccctgctgacaggcagatgcatcagcatcatgcacggctttatcctgaagcacaacatcgagggaatgggcgttaccttcccagcctggtccgacagcagcatcggcaacgaaattgccttcgtgtacaccgacaaggaaatcctcaacacactgaaggaccaggcctacttcgtggatatgcaggattgcggcttcttcaaggtctcccaagtgctggctgtgcccgattcttgcgaggaagtgcggttcatccggaaccaggccgtggccaaaatcttcaccggagagagcagaagaaggctgaaaagactgcagaagagagccctggccagaggcgaagatttcaaccccaagaagatcgaggcccctcgggaaatcgatatcttccacagagtggccatgaccagcaagagctctcaggaggactacatcctgcacatccagaaacaggacgtggactgtcaggctgagccttactttagcaattacggcctggccagcaacgagaagttcaagggaacagtgcctgacctgagccccagcatcgacagaaactgagcggccgctcgagtctagagggcccgtttaaacccgctgatcagcctcgactgtgccttctagttgccagccatctgttgtttgcccctcccccgtgccttccttgaccctggaaggtgccactcccactgtcctttcctaataaaatgaggaaattgcatcgcattgtctgagtaggtgtcattctattctggggggtggggtggggcaggacagcaagggggaggattgggaagacaatagcaggcatgctggggatgcggtgggctctatggcttctgaggcggaaagaaccagctggggctctagggggtatccccacgcgccctgtagcggcgcattaagcgcggcgggtgtggtggttacgcgcagcgtgaccgctacacttgccagcgccctagcgcccgctcctttcgctttcttcccttcctttctcgccacgttcgccggctttccccgtcaagctctaaatcgggggctccctttagggttccgatttagtgctttacggcacctcgaccccaaaaaacttgattagggtgatggttcacgtagtgggccatcgccctgatagacggtttttcgccctttgacgttggagtccacgttctttaatagtggactcttgttccaaactggaacaacactcaaccctatctcggtctattcttttgatttataagggattttgccgatttcggcctattggttaaaaaatgagctgatttaacaaaaatttaacgcgaattaattctgtggaatgtgtgtcagttagggtgtggaaagtccccaggctccccagcaggcagaagtatgcaaagcatgcatctcaattagtcagcaaccaggtgtggaaagtccccaggctccccagcaggcagaagtatgcaaagcatgcatctcaattagtcagcaaccatagtcccgcccctaactccgcccatcccgcccctaactccgcccagttccgcccattctccgccccatggctgactaattttttttatttatgcagaggccgaggccgcctctgcctctgagctattccagaagtagtgaggaggcttttttggaggcctaggcttttgcaaaaagctcccgggagcttgtatatccattttcggatctgatcaagagacaggatgaggatcgtttcgcatgattgaacaagatggattgcacgcaggttctccggccgcttgggtggagaggctattcggctatgactgggcacaacagacaatcggctgctctgatgccgccgtgttccggctgtcagcgcaggggcgcccggttctttttgtcaagaccgacctgtccggtgccctgaatgaactgcaggacgaggcagcgcggctatcgtggctggccacgacgggcgttccttgcgcagctgtgctcgacgttgtcactgaagcgggaagggactggctgctattgggcgaagtgccggggcaggatctcctgtcatctcaccttgctcctgccgagaaagtatccatcatggctgatgcaatgcggcggctgcatacgcttgatccggctacctgcccattcgaccaccaagcgaaacatcgcatcgagcgagcacgtactcggatggaagccggtcttgtcgatcaggatgatctggacgaagagcatcaggggctcgcgccagccgaactgttcgccaggctcaaggcgcgcatgcccgacggcgaggatctcgtcgtgacccatggcgatgcctgcttgccgaatatcatggtggaaaatggccgcttttctggattcatcgactgtggccggctgggtgtggcggaccgctatcaggacatagcgttggctacccgtgatattgctgaagagcttggcggcgaatgggctgaccgcttcctcgtgctttacggtatcgccgctcccgattcgcagcgcatcgccttctatcgccttcttgacgagttcttctgagcgggactctggggttcgaaatgaccgaccaagcgacgcccaacctgccatcacgagatttcgattccaccgccgccttctatgaaaggttgggcttcggaatcgttttccgggacgccggctggatgatcctccagcgcggggatctcatgctggagttcttcgcccaccccaacttgtttattgcagcttataatggttacaaataaagcaatagcatcacaaatttcacaaataaagcatttttttcactgcattctagttgtggtttgtccaaactcatcaatgtatcttatcatgtctgtataccgtcgacctctagctagagcttggcgtaatcatggtcatagctgtttcctgtgtgaaattgttatccgctcacaattccacacaacatacgagccggaagcataaagtgtaaagcctggggtgcctaatgagtgagctaactcacattaattgcgttgcgctcactgcccgctttccagtcgggaaacctgtcgtgccagctgcattaatgaatcggccaacgcgcggggagaggcggtttgcgtattgggcgctcttccgcttcctcgctcactgactcgctgcgctcggtcgttcggctgcggcgagcggtatcagctcactcaaaggcggtaatacggttatccacagaatcaggggataacgcaggaaagaacatgtgagcaaaaggccagcaaaaggccaggaaccgtaaaaaggccgcgttgctggcgtttttccataggctccgcccccctgacgagcatcacaaaaatcgacgctcaagtcagaggtggcgaaacccgacaggactataaagataccaggcgtttccccctggaagctccctcgtgcgctctcctgttccgaccctgccgcttaccggatacctgtccgcctttctcccttcgggaagcgtggcgctttctcatagctcacgctgtaggtatctcagttcggtgtaggtcgttcgctccaagctgggctgtgtgcacgaaccccccgttcagcccgaccgctgcgccttatccggtaactatcgtcttgagtccaacccggtaagacacgacttatcgccactggcagcagccactggtaacaggattagcagagcgaggtatgtaggcggtgctacagagttcttgaagtggtggcctaactacggctacactagaagaacagtatttggtatctgcgctctgctgaagccagttaccttcggaaaaagagttggtagctcttgatccggcaaacaaaccaccgctggtagcggtttttttgtttgcaagcagcagattacgcgcagaaaaaaaggatctcaagaagatcctttgatcttttctacggggtctgacgctcagtggaacgaaaactcacgttaagggattttggtcatgagattatcaaaaaggatcttcacctagatccttttaaattaaaaatgaagttttaaatcaatctaaagtatatatgagtaaacttggtctgacagttaccaatgcttaatcagtgaggcacctatctcagcgatctgtctatttcgttcatccatagttgcctgactccccgtcgtgtagataactacgatacgggagggcttaccatctggccccagtgctgcaatgataccgcgagacccacgctcaccggctccagatttatcagcaataaaccagccagccggaagggccgagcgcagaagtggtcctgcaactttatccgcctccatccagtctattaattgttgccgggaagctagagtaagtagttcgccagttaatagtttgcgcaacgttgttgccattgctacaggcatcgtggtgtcacgctcgtcgtttggtatggcttcattcagctccggttcccaacgatcaaggcgagttacatgatcccccatgttgtgcaaaaaagcggttagctccttcggtcctccgatcgttgtcagaagtaagttggccgcagtgttatcactcatggttatggcagcactgcataattctcttactgtcatgccatccgtaagatgcttttctgtgactggtgagtactcaaccaagtcattctgagaatagtgtatgcggcgaccgagttgctcttgcccggcgtcaatacgggataataccgcgccacatagcagaactttaaaagtgctcatcattggaaaacgttcttcggggcgaaaactctcaaggatcttaccgctgttgagatccagttcgatgtaacccactcgtgcacccaactgatcttcagcatcttttactttcaccagcgtttctgggtgagcaaaaacaggaaggcaaaatgccgcaaaaaagggaataagggcgacacggaaatgttgaatactcatactcttcctttttcaatattattgaagcatttatcagggttattgtctcatgagcggatacatatttgaatgtatttagaaaaataaacaaataggggttccgcgcacatttccccgaaaagtgccacctgacgtc

SEQ ID NO: 122 - DNA, 6078 bp, Artificial Sequence
  Synthetic
gacggatcgggagatctcccgatcccctatggtgcactctcagtacaatctgctctgatgccgcatagttaagccagtatctgctccctgcttgtgtgttggaggtcgctgagtagtgcgcgagcaaaatttaagctacaacaaggcaaggcttgaccgacaattgcatgaagaatctgcttagggttaggcgttttgcgctgcttcgcgatgtacgggccagatatacgcgttgacattgattattgactagttattaatagtaatcaattacggggtcattagttcatagcccatatatggagttccgcgttacataacttacggtaaatggcccgcctggctgaccgcccaacgacccccgcccattgacgtcaataatgacgtatgttcccatagtaacgccaatagggactttccattgacgtcaatgggtggagtatttacggtaaactgcccacttggcagtacatcaagtgtatcatatgccaagtacgccccctattgacgtcaatgacggtaaatggcccgcctggcattatgcccagtacatgaccttatgggactttcctacttggcagtacatctacgtattagtcatcgctattaccatggtgatgcggttttggcagtacatcaatgggcgtggatagcggtttgactcacggggatttccaagtctccaccccattgacgtcaatgggagtttgttttggcaccaaaatcaacgggactttccaaaatgtcgtaacaactccgccccattgacgcaaatgggcggtaggcgtgtacggtgggaggtctatataagcagagctctctggctaactagagaacccactgcttactggcttatcgaaattaatacgactcactatagggagacccaagctggctagcgtttaaacttaagcttggtaccgccaccatgggcccgaaaaagaagcgaaaagttgactacaaggaccacgatggtgattataaagatcatgacatcgactataaagacgatgatgacaagggatccggaatggactggcactacagaaccatcacatttctgcctgagtaccggaacaacgaggccatcgccgccaagtgtatcaaggaactgcacagattcaactacaaatacgagacaagaagcattggagtgtccttcccactgtggggacaggagacagtgggcagaaagatcacctttgtgtctaccaacaagatggaactcgacttcctgatcagcagaagatacttcgtgcagatgaccaagctgggctactttagcatcagtacaacccagaccgtgcctgatgattgcagctatgtgctgttcaagcgggcccactctatcgacaagggcacaagcgccggaagagctagagagctgaagagactggaaaggcgggctctggaacggggcgaaatcttcgaccccatcgcctacagcaagaccaccagccacgccttccagagctaccacagcctggaagaggactcctctagcggcaataaattcagactgaacatccaaatgaaagagcggtctggcaccgtcggcaccggcaagttcagctcctacggcctgggaaataccgacaacagcctgcaggtggtgcccctgatctgagcggccgctcgagtctagagggcccgtttaaacccgctgatcagcctcgactgtgccttctagttgccagccatctgttgtttgcccctcccccgtgccttccttgaccctggaaggtgccactcccactgtcctttcctaataaaatgaggaaattgcatcgcattgtctgagtaggtgtcattctattctggggggtggggtggggcaggacagcaagggggaggattgggaagacaatagcaggcatgctggggatgcggtgggctctatggcttctgaggcggaaagaaccagctggggctctagggggtatccccacgcgccctgtagcggcgcattaagcgcggcgggtgtggtggttacgcgcagcgtgaccgctacacttgccagcgccctagcgcccgctcctttcgctttcttcccttcctttctcgccacgttcgccggctttccccgtcaagctctaaatcgggggctccctttagggttccgatttagtgctttacggcacctcgaccccaaaaaacttgattagggtgatggttcacgtagtgggccatcgccctgatagacggtttttcgccctttgacgttggagtccacgttctttaatagtggactcttgttccaaactggaacaacactcaaccctatctcggtctattcttttgatttataagggattttgccgatttcggcctattggttaaaaaatgagctgatttaacaaaaatttaacgcgaattaattctgtggaatgtgtgtcagttagggtgtggaaagtccccaggctccccagcaggcagaagtatgcaaagcatgcatctcaattagtcagcaaccaggtgtggaaagtccccaggctccccagcaggcagaagtatgcaaagcatgcatctcaattagtcagcaaccatagtcccgcccctaactccgcccatcccgcccctaactccgcccagttccgcccattctccgccccatggctgactaattttttttatttatgcagaggccgaggccgcctctgcctctgagctattccagaagtagtgaggaggcttttttggaggcctaggcttttgcaaaaagctcccgggagcttgtatatccattttcggatctgatcaagagacaggatgaggatcgtttcgcatgattgaacaagatggattgcacgcaggttctccggccgcttgggtggagaggctattcggctatgactgggcacaacagacaatcggctgctctgatgccgccgtgttccggctgtcagcgcaggggcgcccggttctttttgtcaagaccgacctgtccggtgccctgaatgaactgcaggacgaggcagcgcggctatcgtggctggccacgacgggcgttccttgcgcagctgtgctcgacgttgtcactgaagcgggaagggactggctgctattgggcgaagtgccggggcaggatctcctgtcatctcaccttgctcctgccgagaaagtatccatcatggctgatgcaatgcggcggctgcatacgcttgatccggctacctgcccattcgaccaccaagcgaaacatcgcatcgagcgagcacgtactcggatggaagccggtcttgtcgatcaggatgatctggacgaagagcatcaggggctcgcgccagccgaactgttcgccaggctcaaggcgcgcatgcccgacggcgaggatctcgtcgtgacccatggcgatgcctgcttgccgaatatcatggtggaaaatggccgcttttctggattcatcgactgtggccggctgggtgtggcggaccgctatcaggacatagcgttggctacccgtgatattgctgaagagcttggcggcgaatgggctgaccgcttcctcgtgctttacggtatcgccgctcccgattcgcagcgcatcgccttctatcgccttcttgacgagttcttctgagcgggactctggggttcgaaatgaccgaccaagcgacgcccaacctgccatcacgagatttcgattccaccgccgccttctatgaaaggttgggcttcggaatcgttttccgggacgccggctggatgatcctccagcgcggggatctcatgctggagttcttcgcccaccccaacttgtttattgcagcttataatggttacaaataaagcaatagcatcacaaatttcacaaataaagcatttttttcactgcattctagttgtggtttgtccaaactcatcaatgtatcttatcatgtctgtataccgtcgacctctagctagagcttggcgtaatcatggtcatagctgtttcctgtgtgaaattgttatccgctcacaattccacacaacatacgagccggaagcataaagtgtaaagcctggggtgcctaatgagtgagctaactcacattaattgcgttgcgctcactgcccgctttccagtcgggaaacctgtcgtgccagctgcattaatgaatcggccaacgcgcggggagaggcggtttgcgtattgggcgctcttccgcttcctcgctcactgactcgctgcgctcggtcgttcggctgcggcgagcggtatcagctcactcaaaggcggtaatacggttatccacagaatcaggggataacgcaggaaagaacatgtgagcaaaaggccagcaaaaggccaggaaccgtaaaaaggccgcgttgctggcgtttttccataggctccgcccccctgacgagcatcacaaaaatcgacgctcaagtcagaggtggcgaaacccgacaggactataaagataccaggcgtttccccctggaagctccctcgtgcgctctcctgttccgaccctgccgcttaccggatacctgtccgcctttctcccttcgggaagcgtggcgctttctcatagctcacgctgtaggtatctcagttcggtgtaggtcgttcgctccaagctgggctgtgtgcacgaaccccccgttcagcccgaccgctgcgccttatccggtaactatcgtcttgagtccaacccggtaagacacgacttatcgccactggcagcagccactggtaacaggattagcagagcgaggtatgtaggcggtgctacagagttcttgaagtggtggcctaactacggctacactagaagaacagtatttggtatctgcgctctgctgaagccagttaccttcggaaaaagagttggtagctcttgatccggcaaacaaaccaccgctggtagcggtttttttgtttgcaagcagcagattacgcgcagaaaaaaaggatctcaagaagatcctttgatcttttctacggggtctgacgctcagtggaacgaaaactcacgttaagggattttggtcatgagattatcaaaaaggatcttcacctagatccttttaaattaaaaatgaagttttaaatcaatctaaagtatatatgagtaaacttggtctgacagttaccaatgcttaatcagtgaggcacctatctcagcgatctgtctatttcgttcatccatagttgcctgactccccgtcgtgtagataactacgatacgggagggcttaccatctggccccagtgctgcaatgataccgcgagacccacgctcaccggctccagatttatcagcaataaaccagccagccggaagggccgagcgcagaagtggtcctgcaactttatccgcctccatccagtctattaattgttgccgggaagctagagtaagtagttcgccagttaatagtttgcgcaacgttgttgccattgctacaggcatcgtggtgtcacgctcgtcgtttggtatggcttcattcagctccggttcccaacgatcaaggcgagttacatgatcccccatgttgtgcaaaaaagcggttagctccttcggtcctccgatcgttgtcagaagtaagttggccgcagtgttatcactcatggttatggcagcactgcataattctcttactgtcatgccatccgtaagatgcttttctgtgactggtgagtactcaaccaagtcattctgagaatagtgtatgcggcgaccgagttgctcttgcccggcgtcaatacgggataataccgcgccacatagcagaactttaaaagtgctcatcattggaaaacgttcttcggggcgaaaactctcaaggatcttaccgctgttgagatccagttcgatgtaacccactcgtgcacccaactgatcttcagcatcttttactttcaccagcgtttctgggtgagcaaaaacaggaaggcaaaatgccgcaaaaaagggaataagggcgacacggaaatgttgaatactcatactcttcctttttcaatattattgaagcatttatcagggttattgtctcatgagcggatacatatttgaatgtatttagaaaaataaacaaataggggttccgcgcacatttccccgaaaagtgccacctgacgtc

SEQ ID NO: 123 - DNA, 6108 bp, Artificial Sequence
  Synthetic
gacggatcgggagatctcccgatcccctatggtgcactctcagtacaatctgctctgatgccgcatagttaagccagtatctgctccctgcttgtgtgttggaggtcgctgagtagtgcgcgagcaaaatttaagctacaacaaggcaaggcttgaccgacaattgcatgaagaatctgcttagggttaggcgttttgcgctgcttcgcgatgtacgggccagatatacgcgttgacattgattattgactagttattaatagtaatcaattacggggtcattagttcatagcccatatatggagttccgcgttacataacttacggtaaatggcccgcctggctgaccgcccaacgacccccgcccattgacgtcaataatgacgtatgttcccatagtaacgccaatagggactttccattgacgtcaatgggtggagtatttacggtaaactgcccacttggcagtacatcaagtgtatcatatgccaagtacgccccctattgacgtcaatgacggtaaatggcccgcctggcattatgcccagtacatgaccttatgggactttcctacttggcagtacatctacgtattagtcatcgctattaccatggtgatgcggttttggcagtacatcaatgggcgtggatagcggtttgactcacggggatttccaagtctccaccccattgacgtcaatgggagtttgttttggcaccaaaatcaacgggactttccaaaatgtcgtaacaactccgccccattgacgcaaatgggcggtaggcgtgtacggtgggaggtctatataagcagagctctctggctaactagagaacccactgcttactggcttatcgaaattaatacgactcactatagggagacccaagctggctagcgtttaaacttaagcttggtaccgccaccatgggcccgaaaaagaagcgaaaagttgactacaaggaccacgatggtgattataaagatcatgacatcgactataaagacgatgatgacaagggatccggaatgaactacctgagcttcaagatcatccctgacgacgccgaccccagattcctgctgggctacatcctgcaggaggcccaccccatcatcgccagatacggcaacaacaagataggaaccctcttcccagaatggaacgtggacgagcctggaagatccatcgctttttgtggcgccctggacgtgctgaatagaatcatgaagcacgagtacttcagagtgatgattgatgctggcgtcctgaaatacaagctgctggatatcgaccctattaaccaccagaaagtcatcttcctgaagaaccagaagatcaccagcaatacccctaagcggcagcagggcaagatcaagcggatcatcaagcgccagatcgagcggggcgaaatccagagcgcccgggaatacaggcctagaaccgaccagcaacaaacagacatgccagatgtgttctaccacctgtttttcctggacagcaagtctacagagcagatcatgcctctgtgcatccagatgatccccgtggccgagagcgagggcatcgtgggcacccagacattcgaccactacggattcagcaccctggaacagcacagagccgtggtgcctctgatcagccccatcttttgagcggccgctcgagtctagagggcccgtttaaacccgctgatcagcctcgactgtgccttctagttgccagccatctgttgtttgcccctcccccgtgccttccttgaccctggaaggtgccactcccactgtcctttcctaataaaatgaggaaattgcatcgcattgtctgagtaggtgtcattctattctggggggtggggtggggcaggacagcaagggggaggattgggaagacaatagcaggcatgctggggatgcggtgggctctatggcttctgaggcggaaagaaccagctggggctctagggggtatccccacgcgccctgtagcggcgcattaagcgcggcgggtgtggtggttacgcgcagcgtgaccgctacacttgccagcgccctagcgcccgctcctttcgctttcttcccttcctttctcgccacgttcgccggctttccccgtcaagctctaaatcgggggctccctttagggttccgatttagtgctttacggcacctcgaccccaaaaaacttgattagggtgatggttcacgtagtgggccatcgccctgatagacggtttttcgccctttgacgttggagtccacgttctttaatagtggactcttgttccaaactggaacaacactcaaccctatctcggtctattcttttgatttataagggattttgccgatttcggcctattggttaaaaaatgagctgatttaacaaaaatttaacgcgaattaattctgtggaatgtgtgtcagttagggtgtggaaagtccccaggctccccagcaggcagaagtatgcaaagcatgcatctcaattagtcagcaaccaggtgtggaaagtccccaggctccccagcaggcagaagtatgcaaagcatgcatctcaattagtcagcaaccatagtcccgcccctaactccgcccatcccgcccctaactccgcccagttccgcccattctccgccccatggctgactaattttttttatttatgcagaggccgaggccgcctctgcctctgagctattccagaagtagtgaggaggcttttttggaggcctaggcttttgcaaaaagctcccgggagcttgtatatccattttcggatctgatcaagagacaggatgaggatcgtttcgcatgattgaacaagatggattgcacgcaggttctccggccgcttgggtggagaggctattcggctatgactgggcacaacagacaatcggctgctctgatgccgccgtgttccggctgtcagcgcaggggcgcccggttctttttgtcaagaccgacctgtccggtgccctgaatgaactgcaggacgaggcagcgcggctatcgtggctggccacgacgggcgttccttgcgcagctgtgctcgacgttgtcactgaagcgggaagggactggctgctattgggcgaagtgccggggcaggatctcctgtcatctcaccttgctcctgccgagaaagtatccatcatggctgatgcaatgcggcggctgcatacgcttgatccggctacctgcccattcgaccaccaagcgaaacatcgcatcgagcgagcacgtactcggatggaagccggtcttgtcgatcaggatgatctggacgaagagcatcaggggctcgcgccagccgaactgttcgccaggctcaaggcgcgcatgcccgacggcgaggatctcgtcgtgacccatggcgatgcctgcttgccgaatatcatggtggaaaatggccgcttttctggattcatcgactgtggccggctgggtgtggcggaccgctatcaggacatagcgttggctacccgtgatattgctgaagagcttggcggcgaatgggctgaccgcttcctcgtgctttacggtatcgccgctcccgattcgcagcgcatcgccttctatcgccttcttgacgagttcttctgagcgggactctggggttcgaaatgaccgaccaagcgacgcccaacctgccatcacgagatttcgattccaccgccgccttctatgaaaggttgggcttcggaatcgttttccgggacgccggctggatgatcctccagcgcggggatctcatgctggagttcttcgcccaccccaacttgtttattgcagcttataatggttacaaataaagcaatagcatcacaaatttcacaaataaagcatttttttcactgcattctagttgtggtttgtccaaactcatcaatgtatcttatcatgtctgtataccgtcgacctctagctagagcttggcgtaatcatggtcatagctgtttcctgtgtgaaattgttatccgctcacaattccacacaacatacgagccggaagcataaagtgtaaagcctggggtgcctaatgagtgagctaactcacattaattgcgttgcgctcactgcccgctttccagtcgggaaacctgtcgtgccagctgcattaatgaatcggccaacgcgcggggagaggcggtttgcgtattgggcgctcttccgcttcctcgctcactgactcgctgcgctcggtcgttcggctgcggcgagcggtatcagctcactcaaaggcggtaatacggttatccacagaatcaggggataacgcaggaaagaacatgtgagcaaaaggccagcaaaaggccaggaaccgtaaaaaggccgcgttgctggcgtttttccataggctccgcccccctgacgagcatcacaaaaatcgacgctcaagtcagaggtggcgaaacccgacaggactataaagataccaggcgtttccccctggaagctccctcgtgcgctctcctgttccgaccctgccgcttaccggatacctgtccgcctttctcccttcgggaagcgtggcgctttctcatagctcacgctgtaggtatctcagttcggtgtaggtcgttcgctccaagctgggctgtgtgcacgaaccccccgttcagcccgaccgctgcgccttatccggtaactatcgtcttgagtccaacccggtaagacacgacttatcgccactggcagcagccactggtaacaggattagcagagcgaggtatgtaggcggtgctacagagttcttgaagtggtggcctaactacggctacactagaagaacagtatttggtatctgcgctctgctgaagccagttaccttcggaaaaagagttggtagctcttgatccggcaaacaaaccaccgctggtagcggtttttttgtttgcaagcagcagattacgcgcagaaaaaaaggatctcaagaagatcctttgatcttttctacggggtctgacgctcagtggaacgaaaactcacgttaagggattttggtcatgagattatcaaaaaggatcttcacctagatccttttaaattaaaaatgaagttttaaatcaatctaaagtatatatgagtaaacttggtctgacagttaccaatgcttaatcagtgaggcacctatctcagcgatctgtctatttcgttcatccatagttgcctgactccccgtcgtgtagataactacgatacgggagggcttaccatctggccccagtgctgcaatgataccgcgagacccacgctcaccggctccagatttatcagcaataaaccagccagccggaagggccgagcgcagaagtggtcctgcaactttatccgcctccatccagtctattaattgttgccgggaagctagagtaagtagttcgccagttaatagtttgcgcaacgttgttgccattgctacaggcatcgtggtgtcacgctcgtcgtttggtatggcttcattcagctccggttcccaacgatcaaggcgagttacatgatcccccatgttgtgcaaaaaagcggttagctccttcggtcctccgatcgttgtcagaagtaagttggccgcagtgttatcactcatggttatggcagcactgcataattctcttactgtcatgccatccgtaagatgcttttctgtgactggtgagtactcaaccaagtcattctgagaatagtgtatgcggcgaccgagttgctcttgcccggcgtcaatacgggataataccgcgccacatagcagaactttaaaagtgctcatcattggaaaacgttcttcggggcgaaaactctcaaggatcttaccgctgttgagatccagttcgatgtaacccactcgtgcacccaactgatcttcagcatcttttactttcaccagcgtttctgggtgagcaaaaacaggaaggcaaaatgccgcaaaaaagggaataagggcgacacggaaatgttgaatactcatactcttcctttttcaatattattgaagcatttatcagggttattgtctcatgagcggatacatatttgaatgtatttagaaaaataaacaaataggggttccgcgcacatttccccgaaaagtgccacctgacgtc

SEQ ID NO: 124 - DNA, 6858 bp, Artificial Sequence
  Synthetic
ttcagtgcaatttatctcttcaaatgtagcacctgaagtcagccccatacgatataagttgtaattctcatgttagtcatgccccgcgcccaccggaaggagctgactgggttgaaggctctcaagggcatcggtcgagatcccggtgcctaatgagtgagctaacttacattaattgcgttgcgctcactgcccgctttccagtcgggaaacctgtcgtgccagctgcattaatgaatcggccaacgcgcggggagaggcggtttgcgtattgggcgccagggtggtttttcttttcaccagtgagacgggcaacagctgattgcccttcaccgcctggccctgagagagttgcagcaagcggtccacgctggtttgccccagcaggcgaaaatcctgtttgatggtggttaacggcgggatataacatgagctgtcttcggtatcgtcgtatcccactaccgagatgtccgcaccaacgcgcagcccggactcggtaatggcgcgcattgcgcccagcgccatctgatcgttggcaaccagcatcgcagtgggaacgatgccctcattcagcatttgcatggtttgttgaaaaccggacatggcactccagtcgccttcccgttccgctatcggctgaatttgattgcgagtgagatatttatgccagccagccagacgcagacgcgccgagacagaacttaatgggcccgctaacagcgcgatttgctggtgacccaatgcgaccagatgctccacgcccagtcgcgtaccgtcttcatgggagaaaataatactgttgatgggtgtctggtcagagacatcaagaaataacgccggaacattagtgcaggcagcttccacagcaatggcatcctggtcatccagcggatagttaatgatcagcccactgacgcgttgcgcgagaagattgtgcaccgccgctttacaggcttcgacgccgcttcgttctaccatcgacaccaccacgctggcacccagttgatcggcgcgagatttaatcgccgcgacaatttgcgacggcgcgtgcagggccagactggaggtggcaacgccaatcagcaacgactgtttgcccgccagttgttgtgccacgcggttgggaatgtaattcagctccgccatcgccgcttccactttttcccgcgttttcgcagaaacgtggctggcctggttcaccacgcgggaaacggtctgataagagacaccggcatactctgcgacatcgtataacgttactggtttcacattcaccaccctgaattgactctcttccgggcgctatcatgccataccgcgaaaggttttgcgccattcgatggtgtccgggatctcgacgctctcccttatgcgactcctgcattaggaaattaatacgactcactataggggaattgtgagcggataacaattcccctgtagaaataattttgtttaactttaataaggagatataccatggcgacaagtttacctacgccctcagcaattacgacttcggcgttagagtatgcattccatactcccgctcgcaatctaacgaaatctcgcggaaaaaacattcatcgttatgtcagtgtaaagatgagtaagaggattacggtagaatctactctagagtgtgatgcctgctatcactttgattttgagccaagtattgttcgcttttgcgctcaaccgattcgatttttatattatctcaatggtcagtctcactcctatgttcctgactttctagttcaatttgataccaacgagtttgttctatatgaagtaaagtcagcttatgctaagaacaaacctgattttgatgttgaatgggaggcgaaagtaaaagcagcaactgaactagggctagaattggagcttgttgaagagagtgatattagggatacggttgtattaaataatcttaagcgcatgcatcgttatgcttcgaaagatgagctgaataacgtacataactctctcttaaaaataataaagtacaatggcgcccaatctgcaagatgcttgggagaacagttgggtttaaaaggccgaactgttttaccaattttgtgcgatttgctgtcaaggtgtttactcgatacacgtttggataagcctctatctcttgaatctcgatttgagttggccagttatggctaagaaagggttctcaagtttccatagaaaagcagtctcttcccaagatacgcttgaatcgatagagcttgtctctagcgctaattgtctagaaagtgttacgtatcaagatatatcagcatttcccgaaacaattgcggtagagattaatttccgattaagcattcttcgctttttagcgcgaaagtgcgaaaccattgtggccaaatcaattgaaccacatcgtgtagagctacagcaaaactatagtagaaaaatacccagtgcaataacgatatatcgatggtggcttgcttttcgaaaatcagactacaaccccattagcttagcacctaatatcaaggatagaggtaatagagagacaaaagtgtcaacagttgttgattctattatggaacaggcagttgaaagagttatatctggacgaaaagtcaatgttagctctgcatataaacgtgttcgacgaaaagttcgtcaatacaatctaactcatggaacgaaatacacgtatcctaagtacgaatctgtaagaaagcgagtaaaaaagaaaaccccatttgagttattagccgcagggaaaggggagagagtagctaagagagagtttcgccgaatgggaaaaaagatcctcacgtctagcgtgctagagagggttgaaatagatcacactgtcgttgacctttttgcagtacacgaagagtatcgaatcccattgggccgaccttggcttactcaattggttgattgttacagtaaagctgtaatcggtttttatttaggtttcgagcctcctagctatgtgtcggtttcccttgcacttaagaatgcaatacaacgcaaagatgacttaatctcctcgtatgaatcgatcgagaatgaatggctatgttatggcatcccagacctactcgtaactgataatggtaaagagtttttgtcgaaagcatttgatcaagcatgtgaatcactattgatcaatgtgcatcaaaataaagttgagacgcccgacaacaaacctcatgttgaacgtaactacgggactattaatacttctctgttagacgatttacctgggaaatccttcagccagtaccttcaaagagaagggtacgactctgtgggagaagctacccttacactcaatgagattagagaaatttacttaatttggttggtggatatttatcataaaaaacccaatcagagaggcactaattgtcctaatgttgcgtggaaaaagggttgtcaagaatgggaaccagaggagttctctggttctaaagacgaattagactttaaatttgctattgttgattacaaacaacttactaaagtagggataactgtctacaaagaactgagttatagcaatgaccgtttagctgaatatagagggaagaaaggaaaccataaagttcagttcaagtataaccctgagtgtatggcagttatttgggtgttggatgaggatatgaatgagtactttacagttaatgcgattgactacgaatatgcaagtagagtatcactttggcaacataaatataacatgaaatatcaagcagaactaaattcagcagaatatgatgaggacaaggaaattgatgcagaaataaaaattgaagaaatcgcagatcgttcaattgttaagactaacaaaatcagagctcggaggcgtggcgctaggcatcaagagaatagcgcaagggctaagtcaatcagtaatgcgaacccggcctcgatacaaaaacatgaagatgaaatcgttagtgcagataatgacgattgggatattgattatgtctgagaaatcgtcaaatgagtgaaacgcgtgaggctcgtatatcaagagctaaaagggcatttgtatccacaccgagcgttaggaaaatcttgagttacatggatagatgtagagatctatcagacctagagtctgagcctacatgcatgatggtctatggtgcttcgggtgtaggtaaaacgaccgtcatcaagaaatacttaaatcaaaacagaagagagtccgaagccgggggcgatataataccggttttgcatattgagttgccagacaatgcgaagccagtagatgcagcaagggaattgctggttgaaatgggtgacccgctagcactttatgaaactgacttagctagattgacgaaaagactgactgaattaatccctgcggtcggcgtgaagctgattattatcgatgagttccaacatttggtggaagaaaggtcaaatcgggttcttacccaagtaggtaattggctaaaaatgatacttaacaaaacgaaatgtccaattgttatatttggtatgccatactcaaaagttgtactgcaagcaaactcgcaacttcacgggcgattttccattcaggttgaactgcgcccctttagctaccagggaggtagaggtgtatttaaaacttttttggaataccttgataaagccctaccttttgaaaaacaggctggcttagccaacgaaagtttgcagaaaaaattgtatgcattctctcagggaaacatgcgttcgttgagaaaccttatttatcaagcatctatcgaagcaattgataatcagcatgagacgataaccgaagaagatttcgtttttgcatcgaagttgacatcgggcgataaacccaactcatggaaaaatccttttgaggagggtgttgaggtaacagaagatatgttacgaccgccaccaaaagatattggttgggaggactatttgagacattcaaccccgagagtgagtaaaccaggtagaaataaaaactttttcgaataacctaggctgctgccaccgctgagcaataactagcataaccccttggggcctctaaacgggtcttgaggggttttttgctgaaacctcaggcatttgagaagcacacggtcacactgcttccggtagtcaataaaccggtaaaccagcaatagacataagcggctatttaacgaccctgccctgaaccgacgacaagctgacgaccgggtctccgcaagtggcacttttcggggaaatgtgcgcggaacccctatttgtttatttttctaaatacattcaaatatgtatccgctcatgaattaattcttagaaaaactcatcgagcatcaaatgaaactgcaatttattcatatcaggattatcaataccatatttttgaaaaagccgtttctgtaatgaaggagaaaactcaccgaggcagttccataggatggcaagatcctggtatcggtctgcgattccgactcgtccaacatcaatacaacctattaatttcccctcgtcaaaaataaggttatcaagtgagaaatcaccatgagtgacgactgaatccggtgagaatggcaaaagtttatgcatttctttccagacttgttcaacaggccagccattacgctcgtcatcaaaatcactcgcatcaaccaaaccgttattcattcgtgattgcgcctgagcgagacgaaatacgcggtcgctgttaaaaggacaattacaaacaggaatcgaatgcaaccggcgcaggaacactgccagcgcatcaacaatattttcacctgaatcaggatattcttctaatacctggaatgctgttttcccggggatcgcagtggtgagtaaccatgcatcatcaggagtacggataaaatgcttgatggtcggaagaggcataaattccgtcagccagtttagtctgaccatctcatctgtaacatcattggcaacgctacctttgccatgtttcagaaacaactctggcgcatcgggcttcccatacaatcgatagattgtcgcacctgattgcccgacattatcgcgagcccatttatacccatataaatcagcatccatgttggaatttaatcgcggcctagagcaagacgtttcccgttgaatatggctcatactcttcctttttcaatattattgaagcatttatcagggttattgtctcatgagcggatacatatttgaatgtatttagaaaaataaacaaataggcatgctagcgcagaaacgtcctagaagatgccaggaggatacttagcagagagacaataaggccggagcgaagccgtttttccataggctccgcccccctgacgaacatcacgaaatctgacgctcaaatcagtggtggcgaaacccgacaggactataaagataccaggcgtttccccctgatggctccctcttgcgctctcctgttcccgtcctgcggcgtccgtgttgtggtggaggctttacccaaatcaccacgtcccgttccgtgtagacagttcgctccaagctgggctgtgtgcaagaaccccccgttcagcccgactgctgcgccttatccggtaactatcatcttgagtccaacccggaaagacacgacaaaacgccactggcagcagccattggtaactgagaattagtggatttagatatcgagagtcttgaagtggtggcctaacagaggctacactgaaaggacagtatttggtatctgcgctccactaaagccagttaccaggttaagcagttccccaactgacttaaccttcgatcaaaccgcctccccaggcggttttttcgtttacagagcaggagattacgacgatcgtaaaaggatctcaagaagatcctttacggattcccgacaccatcactctagat

SEQ ID NO: 125 - DNA, 4791 bp, Artificial Sequence
  Synthetic
agcgcccaatacgcaaaccgcctctccccgcgcgttggccgattcattaatgcagctggcacgacaggtttcccgactggaaagcgggcagtgagcgcaacgcaattaatgtgagttagctcactcattaggcaccccaggctttacactttatgcttccggctcgtatgttgtgtggaattgtgagcggataacaatttcacacaggaaacagctatgaccatgattacgccaagctatttaggtgacactatagaatactcaagctatgcatcaagcttggtaccgagctcggatccactagtaacggccgccagtgtgctggaattcgccctttattaccgcctttgagtgagctgataccgctcgccgcagccgaacgaccgagcgcagcgagtcagtgagcgaggaagctcgaggcagtgaaaaaaatgctttatttgtgaaatttgtgatgctattgctttatttgtaaccattataagctgcaataaacaagttaacaacaacaattgcattcattttatgtttcaggttcagggggaggtgtgggaggttttttaaagcaagtaaaacctctacaaatgtggtatggctgattatgatcctctagagatatcgtcgacaagcttatcgatgcggccgcgctagcacgcgtcagctgactagaggatccccgggtaccgagctcgaattcttacttgtacagctcgtccatgccgtacaggaacaggtggtggcggccctcggagcgctcgtactgttccacgatggtgtagtcctcgttgtgggaggtgatgtccagcttggtgtccacgtagtagtagccgggcagttgcacgggcttcttggccatgtagatggtcttgaactccaccaggtagtggccgccgtccttcagcttcagggcctggtggatctcgcccttcagcacgccgtcgcgggggtacaggcgctcggtggaggcctcccagcccatggtcttcttctgcattacggggccgtcgggggggaagttggtgccgcgcatcttcaccttgtagatcagcgtgccgtcctgcagggaggagtcctgggtcacggtcaccagaccgccgtcctcgaagttcatcacgcgctcccacttgaagccctcggggaaggacagcttcttgtaatcggggatgtcggcggggtgcttcacgtacgccttggagccgtacatgaactggggggacaggatgtcccaggcgaagggcagggggccgcccttggtcaccttcagcttggcggtctgggtgccctcgtaggggcggccctcgccctcgccctcgatctcgaactcgtggccgttcatggagccctccatgcgcaccttgaagcgcatgaactctttgatgacctcctcgcccttgctcacggtggaacccagtccgccaccggaagttttatcgtcgtcatccttgtagtccatggtggcgaattctccaggcgatctgacggttcactaaacgagctctgcttatataggcctcccaccgtacacgcctacctcgccccactgtggggtggaggggacactattaccctgttatccctacgtcgcaagggcgaattctgcagatatccatcacactggcggccgctcgagcatgcatctagagggcccaattcgccctatagtgccccactgtggggtggaggggacagtcgtattacaattcactggccgtcgttttacaacgtcgtgactgggaaaaccctggcgttacccaacttaatcgccttgcagcacatccccctttcgccagctggcgtaatagcgaagaggcccgcaccgatcgcccttcccaacagttgcgcagcctatacgtacggcagtttaaggtttacacctataaaagagagagccgttatcgtctgtttgtggatgtacagagtgatattattgacacgccggggcgacggatggtgatccccctggccagtgcacgtctgctgtcagataaagtctcccgtgaactttacccggtggtgcatatcggggatgaaagctggcgcatgatgaccaccgatatggccagtgtgccggtctccgttatcggggaagaagtggctgatctcagccaccgcgaaaatgacatcaaaaacgccattaacctgatgttctggggaatataaatgtcaggcatgagattatcaaaaaggatcttcacctagatccttttcacgtagaaagccagtccgcagaaacggtgctgaccccggatgaatgtcagctactgggctatctggacaagggaaaacgcaagcgcaaagagaaagcaggtagcttgcagtgggcttacatggcgatagctagactgggcggttttatggacagcaagcgaaccggaattgccagctggggcgccctctggtaaggttgggaagccctgcaaagtaaactggatggctttctcgccgccaaggatctgatggcgcaggggatcaagctctgatcaagagacaggatgaggatcgtttcgcatgattgaacaagatggattgcacgcaggttctccggccgcttgggtggagaggctattcggctatgactgggcacaacagacaatcggctgctctgatgccgccgtgttccggctgtcagcgcaggggcgcccggttctttttgtcaagaccgacctgtccggtgccctgaatgaactgcaagacgaggcagcgcggctatcgtggctggccacgacgggcgttccttgcgcagctgtgctcgacgttgtcactgaagcgggaagggactggctgctattgggcgaagtgccggggcaggatctcctgtcatctcaccttgctcctgccgagaaagtatccatcatggctgatgcaatgcggcggctgcatacgcttgatccggctacctgcccattcgaccaccaagcgaaacatcgcatcgagcgagcacgtactcggatggaagccggtcttgtcgatcaggatgatctggacgaagagcatcaggggctcgcgccagccgaactgttcgccaggctcaaggcgagcatgcccgacggcgaggatctcgtcgtgacccatggcgatgcctgcttgccgaatatcatggtggaaaatggccgcttttctggattcatcgactgtggccggctgggtgtggcggaccgctatcaggacatagcgttggctacccgtgatattgctgaagagcttggcggcgaatgggctgaccgcttcctcgtgctttacggtatcgccgctcccgattcgcagcgcatcgccttctatcgccttcttgacgagttcttctgaattattaacgcttacaatttcctgatgcggtattttctccttacgcatctgtgcggtatttcacaccgcatacaggtggcacttttcggggaaatgtgcgcggaacccctatttgtttatttttctaaatacattcaaatatgtatccgctcatgagacaataaccctgataaatgcttcaataatagcacgtgaggagggccaccatggccaagttgaccagtgccgttccggtgctcaccgcgcgcgacgtcgccggagcggtcgagttctggaccgaccggctcgggttctcccgggacttcgtggaggacgacttcgccggtgtggtccgggacgacgtgaccctgttcatcagcgcggtccaggaccaggtggtgccggacaacaccctggcctgggtgtgggtgcgcggcctggacgagctgtacgccgagtggtcggaggtcgtgtccacgaacttccgggacgcctccgggccggccatgaccgagatcggcgagcagccgtgggggcgggagttcgccctgcgcgacccggccggcaactgcgtgcacttcgtggccgaggagcaggactgacacgtgctaaaacttcatttttaatttaaaaggatctaggtgaagatcctttttgataatctcatgaccaaaatcccttaacgtgagttttcgttccactgagcgtcagaccccgtagaaaagatcaaaggatcttcttgagatcctttttttctgcgcgtaatctgctgcttgcaaacaaaaaaaccaccgctaccagcggtggtttgtttgccggatcaagagctaccaactctttttccgaaggtaactggcttcagcagagcgcagataccaaatactgtccttctagtgtagccgtagttaggccaccacttcaagaactctgtagcaccgcctacatacctcgctctgctaatcctgttaccagtggctgctgccagtggcgataagtcgtgtcttaccgggttggactcaagacgatagttaccggataaggcgcagcggtcgggctgaacggggggttcgtgcacacagcccagcttggagcgaacgacctacaccgaactgagatacctacagcgtgagctatgagaaagcgccacgcttcccgaagggagaaaggcggacaggtatccggtaagcggcagggtcggaacaggagagcgcacgagggagcttccagggggaaacgcctggtatctttatagtcctgtcgggtttcgccacctctgacttgagcgtcgatttttgtgatgctcgtcaggggggcggagcctatggaaaaacgccagcaacgcggcctttttacggttcctgggcttttgctggccttttgctcacatgttctttcctgcgttatcccctgattctgtggataaccgtattaccgcctttgagtgagctgataccgctcgccgcagccgaacgaccgagcgcagcgagtcagtgagcgaggaagcggaag

SEQ ID NO: 126 - DNA, 3630 bp, Artificial Sequence
  Synthetic
cgcgcgttggccgattcattaatgcagctggcacgacaggtttcccgactggaaagcgggcagtgagcgcaacgcaattaatgtgagttagctcactcattaggcaccccaggctttacactttatgcttccggctcgtatgttgtgtggaattgtgagcggataacaatttcacacaggaaacagctatgaccatgattacgccaagctttgttgatacaaccataaaatgataattacacccataaattgataattatcacacccataaattgatattgcctcttcatggtctaaacttcagtaagtttacgacattttcatgaagaggtcatttccggggatccatggagaaaaaaatcactggatataccaccgttgatatatcccaatggcatcgtaaagaacattttgaggcatttcagtcagttgctcaatgtacctataaccagaccgttcagctggatattacggcctttttaaagaccgtaaagaaaaataagcacaagttttatccggcctttattcacattcttgcccgcctgatgaatgctcatccggagttccgtatggcaatgaaagacggtgagctggtgatatgggatagtgttcacccttgttacaccgttttccatgagcaaactgaaacgttttcatcgctctggagtgaataccacgacgatttccggcagtttctacacatatattcgcaagatgtggcgtgttacggtgaaaacctggcctatttccctaaagggtttattgagaatatgtttttcgtctcagccaatccctgggtgagtttcaccagttttgatttaaacgtggccaatatggacaacttcttcgcccccgttttcactatgggcaaatattatacgcaaggcgacaaggtgctgatgccgctggcgattcaggttcatcatgccgtttgtgatggcttccatgtcggcagaatgcttaatgaattacaacagtactgcgatgagtggcagggcggggcgtaatttttttaaggcagttattggtgcccttctagagtccttactgcagtagttttgctgaaatactcgattcacaaaaatatcaacttatggttgttttgtgagatatcaatatatggttgttttgtggttaagttgctgattataaataattattaaatatcactttatggttgcatcaacaggtaccgagctcgaattcactggccgtcgttttacaacgtcgtgactgggaaaaccctggcgttacccaacttaatcgccttgcagcacatccccctttcgccagctggcgtaatagcgaagaggcccgcaccgatcgcccttcccaacagttgcgcagcctgaatggcgaatggcgcctgatgcggtattttctccttacgcatctgtgcggtatttcacaccgcatatggtgcactctcagtacaatctgctctgatgccgcatagttaagccagccccgacacccgccaacacccgctgacgcgccctgacgggcttgtctgctcccggcatccgcttacagacaagctgtgaccgtctccgggagctgcatgtgtcagaggttttcaccgtcatcaccgaaacgcgcgagacgaaagggcctcgtgatacgcctatttttataggttaatgtcatgataataatggtttcttagacgtcaggtggcacttttcggggaaatgtgcgcggaacccctatttgtttatttttctaaatacattcaaatatgtatccgctcatgagacaataaccctgataaatgcttcaataatattgaaaaaggaagagtatgagtattcaacatttccgtgtcgcccttattcccttttttgcggcattttgccttcctgtttttgctcacccagaaacgctggtgaaagtaaaagatgctgaagatcagttgggtgcacgagtgggttacatcgaactggatctcaacagcggtaagatccttgagagttttcgccccgaagaacgttttccaatgatgagcacttttaaagttctgctatgtggcgcggtattatcccgtattgacgccgggcaagagcaactcggtcgccgcatacactattctcagaatgacttggttgagtactcaccagtcacagaaaagcatcttacggatggcatgacagtaagagaattatgcagtgctgccataaccatgagtgataacactgcggccaacttacttctgacaacgatcggaggaccgaaggagctaaccgcttttttgcacaacatgggggatcatgtaactcgccttgatcgttgggaaccggagctgaatgaagccataccaaacgacgagcgtgacaccacgatgcctgtagcaatggcaacaacgttgcgcaaactattaactggcgaactacttactctagcttcccggcaacaattaatagactggatggaggcggataaagttgcaggaccacttctgcgctcggcccttccggctggctggtttattgctgataaatctggagccggtgagcgtgggtctcgcggtatcattgcagcactggggccagatggtaagccctcccgtatcgtagttatctacacgacggggagtcaggcaactatggatgaacgaaatagacagatcgctgagataggtgcctcactgattaagcattggtaactgtcagaccaagtttactcatatatactttagattgatttaaaacttcatttttaatttaaaaggatctaggtgaagatcctttttgataatctcatgaccaaaatcccttaacgtgagttttcgttccactgagcgtcagaccccgtagaaaagatcaaaggatcttcttgagatcctttttttctgcgcgtaatctgctgcttgcaaacaaaaaaaccaccgctaccagcggtggtttgtttgccggatcaagagctaccaactctttttccgaaggtaactggcttcagcagagcgcagataccaaatactgttcttctagtgtagccgtagttaggccaccacttcaagaactctgtagcaccgcctacatacctcgctctgctaatcctgttaccagtggctgctgccagtggcgataagtcgtgtcttaccgggttggactcaagacgatagttaccggataaggcgcagcggtcgggctgaacggggggttcgtgcacacagcccagcttggagcgaacgacctacaccgaactgagatacctacagcgtgagctatgagaaagcgccacgcttcccgaagggagaaaggcggacaggtatccggtaagcggcagggtcggaacaggagagcgcacgagggagcttccagggggaaacgcctggtatctttatagtcctgtcgggtttcgccacctctgacttgagcgtcgatttttgtgatgctcgtcaggggggcggagcctatggaaaaacgccagcaacgcggcctttttacggttcctggccttttgctggccttttgctcacatgttctttcctgcgttatcccctgattctgtggataaccgtattaccgcctttgagtgagctgataccgctcgccgcagccgaacgaccgagcgcagcgagtcagtgagcgaggaagcggaagagcgcccaatacgcaaaccgcctctccc

SEQ ID NO: 127 - DNA, 8445 bp, Artificial Sequence
  Synthetic
ttagctggataacgccacggaatgatgtcgtcgtgcacaacaatggtgacttctacagcgcggagaatctcgctctctccaggggaagccgaagtttccaaaaggtcgttgatcaaagctcgccgcgttgtttcatcaagccttacggtcaccgtaaccagcaaatcaatatcactgtgtggcttcaggccgccatccactgcggagccgtacaaatgtacggccagcaacgtcggttcgagatggcgctcgatgacgccaactacctctgatagttgagtcgatacttcggcgatcaccgcttccctcatactcttcctttttcaatattattgaagcatttatcagggttattgtctcatgagcggatacatatttgaatgtatttagaaaaataaacaaatagctagctcactcggtcgctacgctccgggcgtgagactgcggcgggcgctgcggacacatacaaagttacccacagattccgtggataagcaggggactaacatgtgaggcaaaacagcagggccgcgccggtggcgtttttccataggctccgccctcctgccagagttcacataaacagacgcttttccggtgcatctgtgggagccgtgaggctcaaccatgaatctgacagtacgggcgaaacccgacaggacttaaagatccccaccgtttccggcgggtcgctccctcttgcgctctcctgttccgaccctgccgtttaccggatacctgttccgcctttctcccttacgggaagtgtggcgctttctcatagctcacacactggtatctcggctcggtgtaggtcgttcgctccaagctgggctgtaagcaagaactccccgttcagcccgactgctgcgccttatccggtaactgttcacttgagtccaacccggaaaagcacggtaaaacgccactggcagcagccattggtaactgggagttcgcagaggatttgtttagctaaacacgcggttgctcttgaagtgtgcgccaaagtccggctacactggaaggacagatttggttgctgtgctctgcgaaagccagttaccacggttaagcagttccccaactgacttaaccttcgatcaaaccacctccccaggtggttttttcgtttacagggcaaaagattacgcgcagaaaaaaaggatctcaagaagatcctttgatcttttctactgaaccgctctagatttcagtgcaatttatctcttcaaatgtagcacctgaagtcagccccatacgatataagttgtaattctcatgttagtcatgccccgcgcccaccggaaggagctgactgggttgaaggctctcaagggcatcggtcgagatcccggtgcctaatgagtgagctaacttacattaattgcgttgcgctcactgcccgctttccagtcgggaaacctgtcgtgccagctgcattaatgaatcggccaacgcgcggggagaggcggtttgcgtattgggcgccagggtggtttttcttttcaccagtgagacgggcaacagctgattgcccttcaccgcctggccctgagagagttgcagcaagcggtccacgctggtttgccccagcaggcgaaaatcctgtttgatggtggttaacggcgggatataacatgagctgtcttcggtatcgtcgtatcccactaccgagatgtccgcaccaacgcgcagcccggactcggtaatggcgcgcattgcgcccagcgccatctgatcgttggcaaccagcatcgcagtgggaacgatgccctcattcagcatttgcatggtttgttgaaaaccggacatggcactccagtcgccttcccgttccgctatcggctgaatttgattgcgagtgagatatttatgccagccagccagacgcagacgcgccgagacagaacttaatgggcccgctaacagcgcgatttgctggtgacccaatgcgaccagatgctccacgcccagtcgcgtaccgtcttcatgggagaaaataatactgttgatgggtgtctggtcagagacatcaagaaataacgccggaacattagtgcaggcagcttccacagcaatggcatcctggtcatccagcggatagttaatgatcagcccactgacgcgttgcgcgagaagattgtgcaccgccgctttacaggcttcgacgccgcttcgttctaccatcgacaccaccacgctggcacccagttgatcggcgcgagatttaatcgccgcgacaatttgcgacggcgcgtgcagggccagactggaggtggcaacgccaatcagcaacgactgtttgcccgccagttgttgtgccacgcggttgggaatgtaattcagctccgccatcgccgcttccactttttcccgcgttttcgcagaaacgtggctggcctggttcaccacgcgggaaacggtctgataagagacaccggcatactctgcgacatcgtataacgttactggtttcacattcaccaccctgaattgactctcttccgggcgctatcatgccataccgcgaaaggttttgcgccattcgatggtgtccgggatctcgacgctctcccttatgcgactcctgcattaggaaattaatacgactcactataggggaattgtgagcggataacaattcccctgtagaaataattttgtttaactttaataaggagatataccatgggtgaactgccgagtaggtagctgataacagtacagcgcggctgaaatcatcattaaagcggtgaactgccgagtaggtagctgataacggatccgaattcgagctcggcgcgcctgcaggtcgacaagcttgcggccgcataatgcttaagtcgaacagaaagtaatcgtattgtacacggccgcataatcgaaattaatacgactcactataggggaattgtgagcggataacaattccccatcttagtatattagttaagtataagaaggagatatacatatgtttttgcaaagacctaaaccttacagcgatgaaagtttagaaagtttctttatccgagtggctaacaaaaatggctacggtgatgtccatcgcttcctagaagccactaaacgattccttcaagacattgaccataatggctatcaaacctttccgactgatataactcggataaacccatactcagctaaaaacagttccagcgcacgaactgcgtcattcctgaaacttgcacaattgacatttaatgaaccgccagagctacttgggttggcaattaacagaacaaacatgaaatactcgccgtcaactagcgcggttgttagaggtgcagaagtctttcctcgcagtttactacggacgcactccatcccctgctgtcctttgtgtctgcgagaaaatggctacgcctcctacctttggcactttcaggggtacgaatactgccacagccataacgtacctttaattaccacttgtagctgtggtaaggagtttgactaccgagtatctgggttaaagggcatttgctgcaaatgcaaggagcctatcaccttaaccagcagggagaacggtcatgaggcagcgtgtactgtttcaaactggcttgctggccatgaatctaaacctctgccaaatcttcctaaaagctaccgatggggtttagttcattggtggatgggtattaaagatagcgagttcgatcacttttcgttcgttcaatttttctcaaactggccaaggtcattccactcgataatcgaagatgaagtagagttcaaccttgagcatgctgttgtcagcacgtctgaattacgactaaaagatcttcttggtcgattgtttttcggttcaattcggttacctgagcggaatcttcaacacaatatcatccttggtgagcttctctgctatttagaaaatcgtttatggcaagacaagggattaatcgccaacctcaaaatgaacgcgttagaggcgactgtaatgttaaattgtagcctcgatcagattgcatcaatggttgaacaacgcatcttgaagccaaatcgaaaaagcaagcccaacagccctcttgatgttaccgattatctatttcatttcggcgatattttctgtctttggttagctgagttccaaagcgatgagtttaaccgttcgttttatgtgtcgaggtggtaaatgcaaactctgaaagaactaatcgcatccaatcctgacgacttaacaactgaacttaagagagcatttcgtccactcacaccgcatattgcaattgatggtaatgaacttgacgcactgacgatattagtcaatttaaccgataagactgatgatcagaaagacctgctcgatcgagccaaatgcaagcaaaaacttcgagatgaaaaatggtgggctagctgcataaattgcgttaattacagacaaagccataacccaaaattcccggatatacgttctgaaggcgtgattcgaacccaagccctgggtgaattaccgagtttcctactctcgtcctcaaaaatcccaccataccattggtcatatagccatgattcaaaatacgtcaacaaaagcgcattcctcaccaatgagttttgttgggatggtgagatctcatgtttgggtgagcttcttaaagatgcagatcacccactttggaatactttgaaaaagttaggttgttctcaaaaaacttgcaaagcaatggcaaaacaactagctgatattactctcacgactatcaatgtcacactcgcaccaaattacctgactcaaatatctctccccgatagtgatacatcctacatttcactctctcctgttgcatcgctatcgatgcaaagccactttcatcagaggctccaagatgaaaatcggcatagcgcgataacgcggtttagccgaactaccaacatgggggtcactgcgatgacatgtggcggcgcatttagaatgttaaagtctggcgctaagttttccagcccccctcatcaccgattaaacagtaaacgaagttggttgacgtcagagcatgttcagtcattaaaacagtaccagcgcctcaacaaaagcctcatacctgaaaactctcggattgcactccgtagaaaatacaaaatcgagcttcaaaatatggtcagatcttggtttgcaatgcaagaccatacccttgattcgaacatacttatccaacatttgaatcatgacctatcttacttaggagccacaaaacgttttgcatacgatccagcgatgaccaagctctttactgagcttttgaaacgagagttatcaaattcaatcaataatggtgagcaacacactaatggatcgtttttagtcctaccgaatatcagggtttgtggcgcaacagctttaagctccccggtaacggtggggattccatcacttacagctttctttggcttcgttcacgcatttgaacggaatataaatcgcaccacctcatcgtttcgtgttgaatcctttgcgatatgcgtccatcaactacatgtcgagaagcgaggtttgacagcagagtttgtggaaaaaggcgacgggactatatccgctcccgcgacccgggatgactggcagtgtgatgtcgtatttagccttattttgaacaccaactttgctcaacatattgaccaagatacgttagttacatcactaccaaagcgattggctcggggttcagcaaaaattgcgattgatgactttaaacatatcaactcattctcgacattagaaacagcgatcgaatctctgccaatagaagctggtaggtggttatcactttacgcacagtcaaacaataatctaagtgatctattagcagccatgacagaggaccatcagctcatggcaagctgcgtcggttaccacttgttagaagagcccaaagataaaccaaactccctcagaggttacaaacacgctatcgccgagtgcatcattggactcattaactcaatcacctttagctcagagactgatcccaacacaatcttttggtcgctaaagaactatcaaaactacctagtggtacagccaaggagtatcaacgatgaaactaccgacaaatctagcctatgagcgctctatcgacccatcagatgtctgtttttttgtcgtctggcccgatgatagaaaaacacctttaacctacaattctcgtactctgctcgggcaaatggaagcggcatcattagcctatgatgtctcaggtcaaccaataaaaagtgccaccgctgaggcgttagctcaagggaaccctcatcaagttgatttctgccacgttccatacggtgcgagtcatattgaatgcagtttctccgtctcgttttcttctgaactacgtcaaccatataagtgtaactcaagcaaagttaaacaaacgctagtgcaattagtcgagctctacgaaacgaaaatcggctggactgagctagcaacccgatatttgatgaacatttgcaacggtaaatggctgtggaaaaatacccgtaaagcctattgctggaacattgtacttacaccttggccttggaacggggaaaaggttggatttgaagatattcgtactaactacacctcacggcaagactttaaaaataataaaaattggtctgctatagttgaaatgatcaaaaccgcattttctagtactgatgggctggcgatatttgaagtcagggccaccttgcacttgccaacgaatgctatggtgcggccaagccaagttttcacagaaaaagaaagtggcagtaaaagtaaatctaaaactcaaaacagtcgagtttttcagagtacaactattgatggtgaacgatcgccaatactaggggcctttaaaacgggagcagctattgcaaccattgacgactggtatcctgaagccactgagccactaagggtcggacggtttggggttcatcgcgaagatgtcacttgctaccgtcatccgtctaccggaaaagattttttctcgatattacaacaagcagagcactatattgaagtgttgagcgccaacaaaactcccgctcaagaaactatcaacgacatgcactttttaatggctaacctgattaagggtgggatgttccagcataaaggagactgactgtgaaatggtattataagacaatcacctttctgccagagttgtgcaacaacgagtcactggctgcaaagtgtctccgcgttctgcatggatttaactatcagtatgagacacgaaatatcggcgtttcatttccgctttggtgtgatgcaacggttggaaaaaagatttcatttgtcagcaagaacaagatagaactcgacttactacttaaacaacactatttcgtccaaatggaacaacttcaatactttcatatatccaacactgttctcgtcccagaagattgtacatacgtttcctttagacgctgtcaatctatagataagctcacagcagcagggctggcaaggaaaatcagacgcctggagaaacgtgctctatctagaggcgagcaatttgacccatcatcttttgctcaaaaagagcatactgcaatagcgcactaccactcacttggggagtccagcaaacagacgaaccgcaactttcgactcaatatcaggatgctctcggagcaaccccgtgaggggaactcgatttttagtagctatggcttatcaaattcagaaaactcgtttcagcctgtacccttaatctgacctaggctgctgccaccgctgagcaataactagcataaccccttggggcctctaaacgggtcttgaggggttttttgctgaaacctcaggcatttgagaagcacacggtcacactgcttccggtagtcaataaaccggtaaaccagcaatagacataagcggctatttaacgaccctgccctgaaccgacgaccgggtcatcgtggccggatcttgcggcccctcggcttgaacgaattgttagacattatttgccgactaccttggtgatctcgcctttcacgtagtggacaaattcttccaactgatctgcgcgcgaggccaagcgatcttcttcttgtccaagataagcctgtctagcttcaagtatgacgggctgatactgggccggcaggcgctccattgcccagtcggcagcgacatccttcggcgcgattttgccggttactgcgctgtaccaaatgcgggacaacgtaagcactacatttcgctcatcgccagcccagtcgggcggcgagttccatagcgttaaggtttcatttagcgcctcaaatagatcctgttcaggaaccggatcaaagagttcctccgccgctggacctaccaaggcaacgctatgttctcttgcttttgtcagcaagatagccagatcaatgtcgatcgtggctggctcgaagatacctgcaagaatgtcattgcgctgccattctccaaattgcagttcgcgc

SEQ ID NO: 128 - DNA, 6897 bp, Artificial Sequence
  Synthetic
ttcagtgcaatttatctcttcaaatgtagcacctgaagtcagccccatacgatataagttgtaattctcatgttagtcatgccccgcgcccaccggaaggagctgactgggttgaaggctctcaagggcatcggtcgagatcccggtgcctaatgagtgagctaacttacattaattgcgttgcgctcactgcccgctttccagtcgggaaacctgtcgtgccagctgcattaatgaatcggccaacgcgcggggagaggcggtttgcgtattgggcgccagggtggtttttcttttcaccagtgagacgggcaacagctgattgcccttcaccgcctggccctgagagagttgcagcaagcggtccacgctggtttgccccagcaggcgaaaatcctgtttgatggtggttaacggcgggatataacatgagctgtcttcggtatcgtcgtatcccactaccgagatgtccgcaccaacgcgcagcccggactcggtaatggcgcgcattgcgcccagcgccatctgatcgttggcaaccagcatcgcagtgggaacgatgccctcattcagcatttgcatggtttgttgaaaaccggacatggcactccagtcgccttcccgttccgctatcggctgaatttgattgcgagtgagatatttatgccagccagccagacgcagacgcgccgagacagaacttaatgggcccgctaacagcgcgatttgctggtgacccaatgcgaccagatgctccacgcccagtcgcgtaccgtcttcatgggagaaaataatactgttgatgggtgtctggtcagagacatcaagaaataacgccggaacattagtgcaggcagcttccacagcaatggcatcctggtcatccagcggatagttaatgatcagcccactgacgcgttgcgcgagaagattgtgcaccgccgctttacaggcttcgacgccgcttcgttctaccatcgacaccaccacgctggcacccagttgatcggcgcgagatttaatcgccgcgacaatttgcgacggcgcgtgcagggccagactggaggtggcaacgccaatcagcaacgactgtttgcccgccagttgttgtgccacgcggttgggaatgtaattcagctccgccatcgccgcttccactttttcccgcgttttcgcagaaacgtggctggcctggttcaccacgcgggaaacggtctgataagagacaccggcatactctgcgacatcgtataacgttactggtttcacattcaccaccctgaattgactctcttccgggcgctatcatgccataccgcgaaaggttttgcgccattcgatggtgtccgggatctcgacgctctcccttatgcgactcctgcattaggaaattaatacgactcactataggggaattgtgagcggataacaattcccctgtagaaataattttgtttaactttaataaggagatataccatgcctggccctaagaaaaagcgtaaagttggttccggtatggcgacaagtttacctacgccctcagcaattacgacttcggcgttagagtatgcattccatactcccgctcgcaatctaacgaaatctcgcggaaaaaacattcatcgttatgtcagtgtaaagatgagtaagaggattacggtagaatctactctagagtgtgatgcctgctatcactttgattttgagccaagtattgttcgcttttgcgctcaaccgattcgatttttatattatctcaatggtcagtctcactcctatgttcctgactttctagttcaatttgataccaacgagtttgttctatatgaagtaaagtcagcttatgctaagaacaaacctgattttgatgttgaatgggaggcgaaagtaaaagcagcaactgaactagggctagaattggagcttgttgaagagagtgatattagggatacggttgtattaaataatcttaagcgcatgcatcgttatgcttcgaaagatgagctgaataacgtacataactctctcttaaaaataataaagtacaatggcgcccaatctgcaagatgcttgggagaacagttgggtttaaaaggccgaactgttttaccaattttgtgcgatttgctgtcaaggtgtttactcgatacacgtttggataagcctctatctcttgaatctcgatttgagttggccagttatggctaagaaagggttctcaagtttccatagaaaagcagtctcttcccaagatacgcttgaatcgatagagcttgtctctagcgctaattgtctagaaagtgttacgtatcaagatatatcagcatttcccgaaacaattgcggtagagattaatttccgattaagcattcttcgctttttagcgcgaaagtgcgaaaccattgtggccaaatcaattgaaccacatcgtgtagagctacagcaaaactatagtagaaaaatacccagtgcaataacgatatatcgatggtggcttgcttttcgaaaatcagactacaaccccattagcttagcacctaatatcaaggatagaggtaatagagagacaaaagtgtcaacagttgttgattctattatggaacaggcagttgaaagagttatatctggacgaaaagtcaatgttagctctgcatataaacgtgttcgacgaaaagttcgtcaatacaatctaactcatggaacgaaatacacgtatcctaagtacgaatctgtaagaaagcgagtaaaaaagaaaaccccatttgagttattagccgcagggaaaggggagagagtagctaagagagagtttcgccgaatgggaaaaaagatcctcacgtctagcgtgctagagagggttgaaatagatcacactgtcgttgacctttttgcagtacacgaagagtatcgaatcccattgggccgaccttggcttactcaattggttgattgttacagtaaagctgtaatcggtttttatttaggtttcgagcctcctagctatgtgtcggtttcccttgcacttaagaatgcaatacaacgcaaagatgacttaatctcctcgtatgaatcgatcgagaatgaatggctatgttatggcatcccagacctactcgtaactgataatggtaaagagtttttgtcgaaagcatttgatcaagcatgtgaatcactattgatcaatgtgcatcaaaataaagttgagacgcccgacaacaaacctcatgttgaacgtaactacgggactattaatacttctctgttagacgatttacctgggaaatccttcagccagtaccttcaaagagaagggtacgactctgtgggagaagctacccttacactcaatgagattagagaaatttacttaatttggttggtggatatttatcataaaaaacccaatcagagaggcactaattgtcctaatgttgcgtggaaaaagggttgtcaagaatgggaaccagaggagttctctggttctaaagacgaattagactttaaatttgctattgttgattacaaacaacttactaaagtagggataactgtctacaaagaactgagttatagcaatgaccgtttagctgaatatagagggaagaaaggaaaccataaagttcagttcaagtataaccctgagtgtatggcagttatttgggtgttggatgaggatatgaatgagtactttacagttaatgcgattgactacgaatatgcaagtagagtatcactttggcaacataaatataacatgaaatatcaagcagaactaaattcagcagaatatgatgaggacaaggaaattgatgcagaaataaaaattgaagaaatcgcagatcgttcaattgttaagactaacaaaatcagagctcggaggcgtggcgctaggcatcaagagaatagcgcaagggctaagtcaatcagtaatgcgaacccggcctcgatacaaaaacatgaagatgaaatcgttagtgcagataatgacgattgggatattgattatgtctgagaaatcgtcaaatgagtgaaacgcgtgaggctcgtatatcaagagctaaaagggcatttgtatccacaccgagcgttaggaaaatcttgagttacatggatagatgtagagatctatcagacctagagtctgagcctacatgcatgatggtctatggtgcttcgggtgtaggtaaaacgaccgtcatcaagaaatacttaaatcaaaacagaagagagtccgaagccgggggcgatataataccggttttgcatattgagttgccagacaatgcgaagccagtagatgcagcaagggaattgctggttgaaatgggtgacccgctagcactttatgaaactgacttagctagattgacgaaaagactgactgaattaatccctgcggtcggcgtgaagctgattattatcgatgagttccaacatttggtggaagaaaggtcaaatcgggttcttacccaagtaggtaattggctaaaaatgatacttaacaaaacgaaatgtccaattgttatatttggtatgccatactcaaaagttgtactgcaagcaaactcgcaacttcacgggcgattttccattcaggttgaactgcgcccctttagctaccagggaggtagaggtgtatttaaaacttttttggaataccttgataaagccctaccttttgaaaaacaggctggcttagccaacgaaagtttgcagaaaaaattgtatgcattctctcagggaaacatgcgttcgttgagaaaccttatttatcaagcatctatcgaagcaattgataatcagcatgagacgataaccgaagaagatttcgtttttgcatcgaagttgacatcgggcgataaacccaactcatggaaaaatccttttgaggagggtgttgaggtaacagaagatatgttacgaccgccaccaaaagatattggttgggaggactatttgagacattcaaccccgagagtgagtaaaccaggtagaaataaaaactttttcgaataacctaggctgctgccaccgctgagcaataactagcataaccccttggggcctctaaacgggtcttgaggggttttttgctgaaacctcaggcatttgagaagcacacggtcacactgcttccggtagtcaataaaccggtaaaccagcaatagacataagcggctatttaacgaccctgccctgaaccgacgacaagctgacgaccgggtctccgcaagtggcacttttcggggaaatgtgcgcggaacccctatttgtttatttttctaaatacattcaaatatgtatccgctcatgaattaattcttagaaaaactcatcgagcatcaaatgaaactgcaatttattcatatcaggattatcaataccatatttttgaaaaagccgtttctgtaatgaaggagaaaactcaccgaggcagttccataggatggcaagatcctggtatcggtctgcgattccgactcgtccaacatcaatacaacctattaatttcccctcgtcaaaaataaggttatcaagtgagaaatcaccatgagtgacgactgaatccggtgagaatggcaaaagtttatgcatttctttccagacttgttcaacaggccagccattacgctcgtcatcaaaatcactcgcatcaaccaaaccgttattcattcgtgattgcgcctgagcgagacgaaatacgcggtcgctgttaaaaggacaattacaaacaggaatcgaatgcaaccggcgcaggaacactgccagcgcatcaacaatattttcacctgaatcaggatattcttctaatacctggaatgctgttttcccggggatcgcagtggtgagtaaccatgcatcatcaggagtacggataaaatgcttgatggtcggaagaggcataaattccgtcagccagtttagtctgaccatctcatctgtaacatcattggcaacgctacctttgccatgtttcagaaacaactctggcgcatcgggcttcccatacaatcgatagattgtcgcacctgattgcccgacattatcgcgagcccatttatacccatataaatcagcatccatgttggaatttaatcgcggcctagagcaagacgtttcccgttgaatatggctcatactcttcctttttcaatattattgaagcatttatcagggttattgtctcatgagcggatacatatttgaatgtatttagaaaaataaacaaataggcatgctagcgcagaaacgtcctagaagatgccaggaggatacttagcagagagacaataaggccggagcgaagccgtttttccataggctccgcccccctgacgaacatcacgaaatctgacgctcaaatcagtggtggcgaaacccgacaggactataaagataccaggcgtttccccctgatggctccctcttgcgctctcctgttcccgtcctgcggcgtccgtgttgtggtggaggctttacccaaatcaccacgtcccgttccgtgtagacagttcgctccaagctgggctgtgtgcaagaaccccccgttcagcccgactgctgcgccttatccggtaactatcatcttgagtccaacccggaaagacacgacaaaacgccactggcagcagccattggtaactgagaattagtggatttagatatcgagagtcttgaagtggtggcctaacagaggctacactgaaaggacagtatttggtatctgcgctccactaaagccagttaccaggttaagcagttccccaactgacttaaccttcgatcaaaccgcctccccaggcggttttttcgtttacagagcaggagattacgacgatcgtaaaaggatctcaagaagatcctttacggattcccgacaccatcactctagat

SEQ ID NO: 129 - DNA, 6975 bp, Artificial Sequence
  Synthetic
ttcagtgcaatttatctcttcaaatgtagcacctgaagtcagccccatacgatataagttgtaattctcatgttagtcatgccccgcgcccaccggaaggagctgactgggttgaaggctctcaagggcatcggtcgagatcccggtgcctaatgagtgagctaacttacattaattgcgttgcgctcactgcccgctttccagtcgggaaacctgtcgtgccagctgcattaatgaatcggccaacgcgcggggagaggcggtttgcgtattgggcgccagggtggtttttcttttcaccagtgagacgggcaacagctgattgcccttcaccgcctggccctgagagagttgcagcaagcggtccacgctggtttgccccagcaggcgaaaatcctgtttgatggtggttaacggcgggatataacatgagctgtcttcggtatcgtcgtatcccactaccgagatgtccgcaccaacgcgcagcccggactcggtaatggcgcgcattgcgcccagcgccatctgatcgttggcaaccagcatcgcagtgggaacgatgccctcattcagcatttgcatggtttgttgaaaaccggacatggcactccagtcgccttcccgttccgctatcggctgaatttgattgcgagtgagatatttatgccagccagccagacgcagacgcgccgagacagaacttaatgggcccgctaacagcgcgatttgctggtgacccaatgcgaccagatgctccacgcccagtcgcgtaccgtcttcatgggagaaaataatactgttgatgggtgtctggtcagagacatcaagaaataacgccggaacattagtgcaggcagcttccacagcaatggcatcctggtcatccagcggatagttaatgatcagcccactgacgcgttgcgcgagaagattgtgcaccgccgctttacaggcttcgacgccgcttcgttctaccatcgacaccaccacgctggcacccagttgatcggcgcgagatttaatcgccgcgacaatttgcgacggcgcgtgcagggccagactggaggtggcaacgccaatcagcaacgactgtttgcccgccagttgttgtgccacgcggttgggaatgtaattcagctccgccatcgccgcttccactttttcccgcgttttcgcagaaacgtggctggcctggttcaccacgcgggaaacggtctgataagagacaccggcatactctgcgacatcgtataacgttactggtttcacattcaccaccctgaattgactctcttccgggcgctatcatgccataccgcgaaaggttttgcgccattcgatggtgtccgggatctcgacgctctcccttatgcgactcctgcattaggaaattaatacgactcactataggggaattgtgagcggataacaattcccctgtagaaataattttgtttaactttaataaggagatataccatggcgacaagtttacctacgccctcagcaattacgacttcggcgttagagtatgcattccatactcccgctcgcaatctaacgaaatctcgcggaaaaaacattcatcgttatgtcagtgtaaagatgagtaagaggattacggtagaatctactctagagtgtgatgcctgctatcactttgattttgagccaagtattgttcgcttttgcgctcaaccgattcgatttttatattatctcaatggtcagtctcactcctatgttcctgactttctagttcaatttgataccaacgagtttgttctatatgaagtaaagtcagcttatgctaagaacaaacctgattttgatgttgaatgggaggcgaaagtaaaagcagcaactgaactagggctagaattggagcttgttgaagagagtgatattagggatacggttgtattaaataatcttaagcgcatgcatcgttatgcttcgaaagatgagctgaataacgtacataactctctcttaaaaataataaagtacaatggcgcccaatctgcaagatgcttgggagaacagttgggtttaaaaggccgaactgttttaccaattttgtgcgatttgctgtcaaggtgtttactcgatacacgtttggataagcctctatctcttgaatctcgatttgagttggccagttacggtgggtcctctgagggtcgtggcagtcttttgacttgcggtgatgtagaagagaaccctggctaaaaggaggtaaataatgggccctaagaaaaagcgtaaagttggttccgcgatggctaagaaagggttctcaagtttccatagaaaagcagtctcttcccaagatacgcttgaatcgatagagcttgtctctagcgctaattgtctagaaagtgttacgtatcaagatatatcagcatttcccgaaacaattgcggtagagattaatttccgattaagcattcttcgctttttagcgcgaaagtgcgaaaccattgtggccaaatcaattgaaccacatcgtgtagagctacagcaaaactatagtagaaaaatacccagtgcaataacgatatatcgatggtggcttgcttttcgaaaatcagactacaaccccattagcttagcacctaatatcaaggatagaggtaatagagagacaaaagtgtcaacagttgttgattctattatggaacaggcagttgaaagagttatatctggacgaaaagtcaatgttagctctgcatataaacgtgttcgacgaaaagttcgtcaatacaatctaactcatggaacgaaatacacgtatcctaagtacgaatctgtaagaaagcgagtaaaaaagaaaaccccatttgagttattagccgcagggaaaggggagagagtagctaagagagagtttcgccgaatgggaaaaaagatcctcacgtctagcgtgctagagagggttgaaatagatcacactgtcgttgacctttttgcagtacacgaagagtatcgaatcccattgggccgaccttggcttactcaattggttgattgttacagtaaagctgtaatcggtttttatttaggtttcgagcctcctagctatgtgtcggtttcccttgcacttaagaatgcaatacaacgcaaagatgacttaatctcctcgtatgaatcgatcgagaatgaatggctatgttatggcatcccagacctactcgtaactgataatggtaaagagtttttgtcgaaagcatttgatcaagcatgtgaatcactattgatcaatgtgcatcaaaataaagttgagacgcccgacaacaaacctcatgttgaacgtaactacgggactattaatacttctctgttagacgatttacctgggaaatccttcagccagtaccttcaaagagaagggtacgactctgtgggagaagctacccttacactcaatgagattagagaaatttacttaatttggttggtggatatttatcataaaaaacccaatcagagaggcactaattgtcctaatgttgcgtggaaaaagggttgtcaagaatgggaaccagaggagttctctggttctaaagacgaattagactttaaatttgctattgttgattacaaacaacttactaaagtagggataactgtctacaaagaactgagttatagcaatgaccgtttagctgaatatagagggaagaaaggaaaccataaagttcagttcaagtataaccctgagtgtatggcagttatttgggtgttggatgaggatatgaatgagtactttacagttaatgcgattgactacgaatatgcaagtagagtatcactttggcaacataaatataacatgaaatatcaagcagaactaaattcagcagaatatgatgaggacaaggaaattgatgcagaaataaaaattgaagaaatcgcagatcgttcaattgttaagactaacaaaatcagagctcggaggcgtggcgctaggcatcaagagaatagcgcaagggctaagtcaatcagtaatgcgaacccggcctcgatacaaaaacatgaagatgaaatcgttagtgcagataatgacgattgggatattgattatgtctgagaaatcgtcaaatgagtgaaacgcgtgaggctcgtatatcaagagctaaaagggcatttgtatccacaccgagcgttaggaaaatcttgagttacatggatagatgtagagatctatcagacctagagtctgagcctacatgcatgatggtctatggtgcttcgggtgtaggtaaaacgaccgtcatcaagaaatacttaaatcaaaacagaagagagtccgaagccgggggcgatataataccggttttgcatattgagttgccagacaatgcgaagccagtagatgcagcaagggaattgctggttgaaatgggtgacccgctagcactttatgaaactgacttagctagattgacgaaaagactgactgaattaatccctgcggtcggcgtgaagctgattattatcgatgagttccaacatttggtggaagaaaggtcaaatcgggttcttacccaagtaggtaattggctaaaaatgatacttaacaaaacgaaatgtccaattgttatatttggtatgccatactcaaaagttgtactgcaagcaaactcgcaacttcacgggcgattttccattcaggttgaactgcgcccctttagctaccagggaggtagaggtgtatttaaaacttttttggaataccttgataaagccctaccttttgaaaaacaggctggcttagccaacgaaagtttgcagaaaaaattgtatgcattctctcagggaaacatgcgttcgttgagaaaccttatttatcaagcatctatcgaagcaattgataatcagcatgagacgataaccgaagaagatttcgtttttgcatcgaagttgacatcgggcgataaacccaactcatggaaaaatccttttgaggagggtgttgaggtaacagaagatatgttacgaccgccaccaaaagatattggttgggaggactatttgagacattcaaccccgagagtgagtaaaccaggtagaaataaaaactttttcgaataacctaggctgctgccaccgctgagcaataactagcataaccccttggggcctctaaacgggtcttgaggggttttttgctgaaacctcaggcatttgagaagcacacggtcacactgcttccggtagtcaataaaccggtaaaccagcaatagacataagcggctatttaacgaccctgccctgaaccgacgacaagctgacgaccgggtctccgcaagtggcacttttcggggaaatgtgcgcggaacccctatttgtttatttttctaaatacattcaaatatgtatccgctcatgaattaattcttagaaaaactcatcgagcatcaaatgaaactgcaatttattcatatcaggattatcaataccatatttttgaaaaagccgtttctgtaatgaaggagaaaactcaccgaggcagttccataggatggcaagatcctggtatcggtctgcgattccgactcgtccaacatcaatacaacctattaatttcccctcgtcaaaaataaggttatcaagtgagaaatcaccatgagtgacgactgaatccggtgagaatggcaaaagtttatgcatttctttccagacttgttcaacaggccagccattacgctcgtcatcaaaatcactcgcatcaaccaaaccgttattcattcgtgattgcgcctgagcgagacgaaatacgcggtcgctgttaaaaggacaattacaaacaggaatcgaatgcaaccggcgcaggaacactgccagcgcatcaacaatattttcacctgaatcaggatattcttctaatacctggaatgctgttttcccggggatcgcagtggtgagtaaccatgcatcatcaggagtacggataaaatgcttgatggtcggaagaggcataaattccgtcagccagtttagtctgaccatctcatctgtaacatcattggcaacgctacctttgccatgtttcagaaacaactctggcgcatcgggcttcccatacaatcgatagattgtcgcacctgattgcccgacattatcgcgagcccatttatacccatataaatcagcatccatgttggaatttaatcgcggcctagagcaagacgtttcccgttgaatatggctcatactcttcctttttcaatattattgaagcatttatcagggttattgtctcatgagcggatacatatttgaatgtatttagaaaaataaacaaataggcatgctagcgcagaaacgtcctagaagatgccaggaggatacttagcagagagacaataaggccggagcgaagccgtttttccataggctccgcccccctgacgaacatcacgaaatctgacgctcaaatcagtggtggcgaaacccgacaggactataaagataccaggcgtttccccctgatggctccctcttgcgctctcctgttcccgtcctgcggcgtccgtgttgtggtggaggctttacccaaatcaccacgtcccgttccgtgtagacagttcgctccaagctgggctgtgtgcaagaaccccccgttcagcccgactgctgcgccttatccggtaactatcatcttgagtccaacccggaaagacacgacaaaacgccactggcagcagccattggtaactgagaattagtggatttagatatcgagagtcttgaagtggtggcctaacagaggctacactgaaaggacagtatttggtatctgcgctccactaaagccagttaccaggttaagcagttccccaactgacttaaccttcgatcaaaccgcctccccaggcggttttttcgtttacagagcaggagattacgacgatcgtaaaaggatctcaagaagatcctttacggattcccgacaccatcactctagat

SEQ ID NO: 130 - DNA, 6920 bp, Artificial Sequence
  Synthetic
ttcagtgcaatttatctcttcaaatgtagcacctgaagtcagccccatacgatataagttgtaattctcatgttagtcatgccccgcgcccaccggaaggagctgactgggttgaaggctctcaagggcatcggtcgagatcccggtgcctaatgagtgagctaacttacattaattgcgttgcgctcactgcccgctttccagtcgggaaacctgtcgtgccagctgcattaatgaatcggccaacgcgcggggagaggcggtttgcgtattgggcgccagggtggtttttcttttcaccagtgagacgggcaacagctgattgcccttcaccgcctggccctgagagagttgcagcaagcggtccacgctggtttgccccagcaggcgaaaatcctgtttgatggtggttaacggcgggatataacatgagctgtcttcggtatcgtcgtatcccactaccgagatgtccgcaccaacgcgcagcccggactcggtaatggcgcgcattgcgcccagcgccatctgatcgttggcaaccagcatcgcagtgggaacgatgccctcattcagcatttgcatggtttgttgaaaaccggacatggcactccagtcgccttcccgttccgctatcggctgaatttgattgcgagtgagatatttatgccagccagccagacgcagacgcgccgagacagaacttaatgggcccgctaacagcgcgatttgctggtgacccaatgcgaccagatgctccacgcccagtcgcgtaccgtcttcatgggagaaaataatactgttgatgggtgtctggtcagagacatcaagaaataacgccggaacattagtgcaggcagcttccacagcaatggcatcctggtcatccagcggatagttaatgatcagcccactgacgcgttgcgcgagaagattgtgcaccgccgctttacaggcttcgacgccgcttcgttctaccatcgacaccaccacgctggcacccagttgatcggcgcgagatttaatcgccgcgacaatttgcgacggcgcgtgcagggccagactggaggtggcaacgccaatcagcaacgactgtttgcccgccagttgttgtgccacgcggttgggaatgtaattcagctccgccatcgccgcttccactttttcccgcgttttcgcagaaacgtggctggcctggttcaccacgcgggaaacggtctgataagagacaccggcatactctgcgacatcgtataacgttactggtttcacattcaccaccctgaattgactctcttccgggcgctatcatgccataccgcgaaaggttttgcgccattcgatggtgtccgggatctcgacgctctcccttatgcgactcctgcattaggaaattaatacgactcactataggggaattgtgagcggataacaattcccctgtagaaataattttgtttaactttaataaggagatataccatggcgacaagtttacctacgccctcagcaattacgacttcggcgttagagtatgcattccatactcccgctcgcaatctaacgaaatctcgcggaaaaaacattcatcgttatgtcagtgtaaagatgagtaagaggattacggtagaatctactctagagtgtgatgcctgctatcactttgattttgagccaagtattgttcgcttttgcgctcaaccgattcgatttttatattatctcaatggtcagtctcactcctatgttcctgactttctagttcaatttgataccaacgagtttgttctatatgaagtaaagtcagcttatgctaagaacaaacctgattttgatgttgaatgggaggcgaaagtaaaagcagcaactgaactagggctagaattggagcttgttgaagagagtgatattagggatacggttgtattaaataatcttaagcgcatgcatcgttatgcttcgaaagatgagctgaataacgtacataactctctcttaaaaataataaagtacaatggcgcccaatctgcaagatgcttgggagaacagttgggtttaaaaggccgaactgttttaccaattttgtgcgatttgctgtcaaggtgtttactcgatacacgtttggataagcctctatctcttgaatctcgatttgagttggccagttatggctaagaaagggttctcaagtttccatagaaaagcagtctcttcccaagatacgcttgaatcgatagagcttgtctctagcgctaattgtctagaaagtgttacgtatcaagatatatcagcatttcccgaaacaattgcggtagagattaatttccgattaagcattcttcgctttttagcgcgaaagtgcgaaaccattgtggccaaatcaattgaaccacatcgtgtagagctacagcaaaactatagtagaaaaatacccagtgcaataacgatatatcgatggtggcttgcttttcgaaaatcagactacaaccccattagcttagcacctaatatcaaggatagaggtaatagagagacaaaagtgtcaacagttgttgattctattatggaacaggcagttgaaagagttatatctggacgaaaagtcaatgttagctctgcatataaacgtgttcgacgaaaagttcgtcaatacaatctaactcatggaacgaaatacacgtatcctaagtacgaatctgtaagaaagcgagtaaaaaagaaaaccccatttgagttattagccgcagggaaaggggagagagtagctaagagagagtttcgccgaatgggaaaaaagatcctcacgtctagcgtgctagagagggttgaaatagatcacactgtcgttgacctttttgcagtacacgaagagtatcgaatcccattgggccgaccttggcttactcaattggttgattgttacagtaaagctgtaatcggtttttatttaggtttcgagcctcctagctatgtgtcggtttcccttgcacttaagaatgcaatacaacgcaaagatgacttaatctcctcgtatgaatcgatcgagaatgaatggctatgttatggcatcccagacctactcgtaactgataatggtaaagagtttttgtcgaaagcatttgatcaagcatgtgaatcactattgatcaatgtgcatcaaaataaagttgagacgcccgacaacaaacctcatgttgaacgtaactacgggactattaatacttctctgttagacgatttacctgggaaatccttcagccagtaccttcaaagagaagggtacgactctgtgggagaagctacccttacactcaatgagattagagaaatttacttaatttggttggtggatatttatcataaaaaacccaatcagagaggcactaattgtcctaatgttgcgtggaaaaagggttgtcaagaatgggaaccagaggagttctctggttctaaagacgaattagactttaaatttgctattgttgattacaaacaacttactaaagtagggataactgtctacaaagaactgagttatagcaatgaccgtttagctgaatatagagggaagaaaggaaaccataaagttcagttcaagtataaccctgagtgtatggcagttatttgggtgttggatgaggatatgaatgagtactttacagttaatgcgattgactacgaatatgcaagtagagtatcactttggcaacataaatataacatgaaatatcaagcagaactaaattcagcagaatatgatgaggacaaggaaattgatgcagaaataaaaattgaagaaatcgcagatcgttcaattgttaagactaacaaaatcagagctcggaggcgtggcgctaggcatcaagagaatagcgcaagggctaagtcaatcagtaatgcgaacccggcctcgatacaaaaacatgaagatgaaatcgttagtgcagataatgacgattgggatattgattatgtcgggtccggcgagggtcgtggcagtcttttgacttgcggtgatgtagaagagaaccctggctgaaaggaggtaaataatgagtgaaacgcgtgaggctcgtatatcaagagctaaaagggcatttgtatccacaccgagcgttaggaaaatcttgagttacatggatagatgtagagatctatcagacctagagtctgagcctacatgcatgatggtctatggtgcttcgggtgtaggtaaaacgaccgtcatcaagaaatacttaaatcaaaacagaagagagtccgaagccgggggcgatataataccggttttgcatattgagttgccagacaatgcgaagccagtagatgcagcaagggaattgctggttgaaatgggtgacccgctagcactttatgaaactgacttagctagattgacgaaaagactgactgaattaatccctgcggtcggcgtgaagctgattattatcgatgagttccaacatttggtggaagaaaggtcaaatcgggttcttacccaagtaggtaattggctaaaaatgatacttaacaaaacgaaatgtccaattgttatatttggtatgccatactcaaaagttgtactgcaagcaaactcgcaacttcacgggcgattttccattcaggttgaactgcgcccctttagctaccagggaggtagaggtgtatttaaaacttttttggaataccttgataaagccctaccttttgaaaaacaggctggcttagccaacgaaagtttgcagaaaaaattgtatgcattctctcagggaaacatgcgttcgttgagaaaccttatttatcaagcatctatcgaagcaattgataatcagcatgagacgataaccgaagaagatttcgtttttgcatcgaagttgacatcgggcgataaacccaactcatggaaaaatccttttgaggagggtgttgaggtaacagaagatatgttacgaccgccaccaaaagatattggttgggaggactatttgagacattcaaccccgagagtgagtaaaccaggtagaaataaaaactttttcgaataacctaggctgctgccaccgctgagcaataactagcataaccccttggggcctctaaacgggtcttgaggggttttttgctgaaacctcaggcatttgagaagcacacggtcacactgcttccggtagtcaataaaccggtaaaccagcaatagacataagcggctatttaacgaccctgccctgaaccgacgacaagctgacgaccgggtctccgcaagtggcacttttcggggaaatgtgcgcggaacccctatttgtttatttttctaaatacattcaaatatgtatccgctcatgaattaattcttagaaaaactcatcgagcatcaaatgaaactgcaatttattcatatcaggattatcaataccatatttttgaaaaagccgtttctgtaatgaaggagaaaactcaccgaggcagttccataggatggcaagatcctggtatcggtctgcgattccgactcgtccaacatcaatacaacctattaatttcccctcgtcaaaaataaggttatcaagtgagaaatcaccatgagtgacgactgaatccggtgagaatggcaaaagtttatgcatttctttccagacttgttcaacaggccagccattacgctcgtcatcaaaatcactcgcatcaaccaaaccgttattcattcgtgattgcgcctgagcgagacgaaatacgcggtcgctgttaaaaggacaattacaaacaggaatcgaatgcaaccggcgcaggaacactgccagcgcatcaacaatattttcacctgaatcaggatattcttctaatacctggaatgctgttttcccggggatcgcagtggtgagtaaccatgcatcatcaggagtacggataaaatgcttgatggtcggaagaggcataaattccgtcagccagtttagtctgaccatctcatctgtaacatcattggcaacgctacctttgccatgtttcagaaacaactctggcgcatcgggcttcccatacaatcgatagattgtcgcacctgattgcccgacattatcgcgagcccatttatacccatataaatcagcatccatgttggaatttaatcgcggcctagagcaagacgtttcccgttgaatatggctcatactcttcctttttcaatattattgaagcatttatcagggttattgtctcatgagcggatacatatttgaatgtatttagaaaaataaacaaataggcatgctagcgcagaaacgtcctagaagatgccaggaggatacttagcagagagacaataaggccggagcgaagccgtttttccataggctccgcccccctgacgaacatcacgaaatctgacgctcaaatcagtggtggcgaaacccgacaggactataaagataccaggcgtttccccctgatggctccctcttgcgctctcctgttcccgtcctgcggcgtccgtgttgtggtggaggctttacccaaatcaccacgtcccgttccgtgtagacagttcgctccaagctgggctgtgtgcaagaaccccccgttcagcccgactgctgcgccttatccggtaactatcatcttgagtccaacccggaaagacacgacaaaacgccactggcagcagccattggtaactgagaattagtggatttagatatcgagagtcttgaagtggtggcctaacagaggctacactgaaaggacagtatttggtatctgcgctccactaaagccagttaccaggttaagcagttccccaactgacttaaccttcgatcaaaccgcctccccaggcggttttttcgtttacagagcaggagattacgacgatcgtaaaaggatctcaagaagatcctttacggattcccgacaccatcactctagat

SEQ ID NO: 131 - DNA, 6860 bp, Artificial Sequence
  Synthetic
ttcagtgcaatttatctcttcaaatgtagcacctgaagtcagccccatacgatataagttgtaattctcatgttagtcatgccccgcgcccaccggaaggagctgactgggttgaaggctctcaagggcatcggtcgagatcccggtgcctaatgagtgagctaacttacattaattgcgttgcgctcactgcccgctttccagtcgggaaacctgtcgtgccagctgcattaatgaatcggccaacgcgcggggagaggcggtttgcgtattgggcgccagggtggtttttcttttcaccagtgagacgggcaacagctgattgcccttcaccgcctggccctgagagagttgcagcaagcggtccacgctggtttgccccagcaggcgaaaatcctgtttgatggtggttaacggcgggatataacatgagctgtcttcggtatcgtcgtatcccactaccgagatgtccgcaccaacgcgcagcccggactcggtaatggcgcgcattgcgcccagcgccatctgatcgttggcaaccagcatcgcagtgggaacgatgccctcattcagcatttgcatggtttgttgaaaaccggacatggcactccagtcgccttcccgttccgctatcggctgaatttgattgcgagtgagatatttatgccagccagccagacgcagacgcgccgagacagaacttaatgggcccgctaacagcgcgatttgctggtgacccaatgcgaccagatgctccacgcccagtcgcgtaccgtcttcatgggagaaaataatactgttgatgggtgtctggtcagagacatcaagaaataacgccggaacattagtgcaggcagcttccacagcaatggcatcctggtcatccagcggatagttaatgatcagcccactgacgcgttgcgcgagaagattgtgcaccgccgctttacaggcttcgacgccgcttcgttctaccatcgacaccaccacgctggcacccagttgatcggcgcgagatttaatcgccgcgacaatttgcgacggcgcgtgcagggccagactggaggtggcaacgccaatcagcaacgactgtttgcccgccagttgttgtgccacgcggttgggaatgtaattcagctccgccatcgccgcttccactttttcccgcgttttcgcagaaacgtggctggcctggttcaccacgcgggaaacggtctgataagagacaccggcatactctgcgacatcgtataacgttactggtttcacattcaccaccctgaattgactctcttccgggcgctatcatgccataccgcgaaaggttttgcgccattcgatggtgtccgggatctcgacgctctcccttatgcgactcctgcattaggaaattaatacgactcactataggggaattgtgagcggataacaattcccctgtagaaataattttgtttaactttaataaggagatataccatggcgacaagtttacctacgccctcagcaattacgacttcggcgttagagtatgcattccatactcccgctcgcaatctaacgaaatctcgcggaaaaaacattcatcgttatgtcagtgtaaagatgagtaagaggattacggtagaatctactctagagtgtgatgcctgctatcactttgattttgagccaagtattgttcgcttttgcgctcaaccgattcgatttttatattatctcaatggtcagtctcactcctatgttcctgactttctagttcaatttgataccaacgagtttgttctatatgaagtaaagtcagcttatgctaagaacaaacctgattttgatgttgaatgggaggcgaaagtaaaagcagcaactgaactagggctagaattggagcttgttgaagagagtgatattagggatacggttgtattaaataatcttaagcgcatgcatcgttatgcttcgaaagatgagctgaataacgtacataactctctcttaaaaataataaagtacaatggcgcccaatctgcaagatgcttgggagaacagttgggtttaaaaggccgaactgttttaccaattttgtgcgatttgctgtcaaggtgtttactcgatacacgtttggataagcctctatctcttgaatctcgatttgagttggccagttatggcgctaagaaagggttctcaagtttccatagaaaagcagtctcttcccaagatacgcttgaatcgatagagcttgtctctagcgctaattgtctagaaagtgttacgtatcaagatatatcagcatttcccgaaacaattgcggtagagattaatttccgattaagcattcttcgctttttagcgcgaaagtgcgaaaccattgtggccaaatcaattgaaccacatcgtgtagagctacagcaaaactatagtagaaaaatacccagtgcaataacgatatatcgatggtggcttgcttttcgaaaatcagactacaaccccattagcttagcacctaatatcaaggatagaggtaatagagagacaaaagtgtcaacagttgttgattctattatggaacaggcagttgaaagagttatatctggacgaaaagtcaatgttagctctgcatataaacgtgttcgacgaaaagttcgtcaatacaatctaactcatggaacgaaatacacgtatcctaagtacgaatctgtaagaaagcgagtaaaaaagaaaaccccatttgagttattagccgcagggaaaggggagagagtagctaagagagagtttcgccgaatgggaaaaaagatcctcacgtctagcgtgctagagagggttgaaatagatcacactgtcgttgacctttttgcagtacacgaagagtatcgaatcccattgggccgaccttggcttactcaattggttgattgttacagtaaagctgtaatcggtttttatttaggtttcgagcctcctagctatgtgtcggtttcccttgcacttaagaatgcaatacaacgcaaagatgacttaatctcctcgtatgaatcgatcgagaatgaatggctatgttatggcatcccagacctactcgtaactgataatggtaaagagtttttgtcgaaagcatttgatcaagcatgtgaatcactattgatcaatgtgcatcaaaataaagttgagacgcccgacaacaaacctcatgttgaacgtaactacgggactattaatacttctctgttagacgatttacctgggaaatccttcagccagtaccttcaaagagaagggtacgactctgtgggagaagctacccttacactcaatgagattagagaaatttacttaatttggttggtggatatttatcataaaaaacccaatcagagaggcactaattgtcctaatgttgcgtggaaaaagggttgtcaagaatgggaaccagaggagttctctggttctaaagacgaattagactttaaatttgctattgttgattacaaacaacttactaaagtagggataactgtctacaaagaactgagttatagcaatgaccgtttagctgaatatagagggaagaaaggaaaccataaagttcagttcaagtataaccctgagtgtatggcagttatttgggtgttggatgaggatatgaatgagtactttacagttaatgcgattgactacgaatatgcaagtagagtatcactttggcaacataaatataacatgaaatatcaagcagaactaaattcagcagaatatgatgaggacaaggaaattgatgcagaaataaaaattgaagaaatcgcagatcgttcaattgttaagactaacaaaatcagagctcggaggcgtggcgctaggcatcaagagaatagcgcaagggctaagtcaatcagtaatgcgaacccggcctcgatacaaaaacatgaagatgaaatcgttagtgcagataatgacgattgggatattgattatgtctgagaaatcgtcaaatgagtgaaacgcgtgaggctcgtatatcaagagctaaaagggcatttgtatccacaccgagcgttaggaaaatcttgagttacatggatagatgtagagatctatcagacctagagtctgagcctacatgcatgatggtctatggtgcttcgggtgtaggtaaaacgaccgtcatcaagaaatacttaaatcaaaacagaagagagtccgaagccgggggcgatataataccggttttgcatattgagttgccagacaatgcgaagccagtagatgcagcaagggaattgctggttgaaatgggtgacccgctagcactttatgaaactgacttagctagattgacgaaaagactgactgaattaatccctgcggtcggcgtgaagctgattattatcgatgagttccaacatttggtggaagaaaggtcaaatcgggttcttacccaagtaggtaattggctaaaaatgatacttaacaaaacgaaatgtccaattgttatatttggtatgccatactcaaaagttgtactgcaagcaaactcgcaacttcacgggcgattttccattcaggttgaactgcgcccctttagctaccagggaggtagaggtgtatttaaaacttttttggaataccttgataaagccctaccttttgaaaaacaggctggcttagccaacgaaagtttgcagaaaaaattgtatgcattctctcagggaaacatgcgttcgttgagaaaccttatttatcaagcatctatcgaagcaattgataatcagcatgagacgataaccgaagaagatttcgtttttgcatcgaagttgacatcgggcgataaacccaactcatggaaaaatccttttgaggagggtgttgaggtaacagaagatatgttacgaccgccaccaaaagatattggttgggaggactatttgagacattcaaccccgagagtgagtaaaccaggtagaaataaaaactttttcgaataacctaggctgctgccaccgctgagcaataactagcataaccccttggggcctctaaacgggtcttgaggggttttttgctgaaacctcaggcatttgagaagcacacggtcacactgcttccggtagtcaataaaccggtaaaccagcaatagacataagcggctatttaacgaccctgccctgaaccgacgacaagctgacgaccgggtctccgcaagtggcacttttcggggaaatgtgcgcggaacccctatttgtttatttttctaaatacattcaaatatgtatccgctcatgaattaattcttagaaaaactcatcgagcatcaaatgaaactgcaatttattcatatcaggattatcaataccatatttttgaaaaagccgtttctgtaatgaaggagaaaactcaccgaggcagttccataggatggcaagatcctggtatcggtctgcgattccgactcgtccaacatcaatacaacctattaatttcccctcgtcaaaaataaggttatcaagtgagaaatcaccatgagtgacgactgaatccggtgagaatggcaaaagtttatgcatttctttccagacttgttcaacaggccagccattacgctcgtcatcaaaatcactcgcatcaaccaaaccgttattcattcgtgattgcgcctgagcgagacgaaatacgcggtcgctgttaaaaggacaattacaaacaggaatcgaatgcaaccggcgcaggaacactgccagcgcatcaacaatattttcacctgaatcaggatattcttctaatacctggaatgctgttttcccggggatcgcagtggtgagtaaccatgcatcatcaggagtacggataaaatgcttgatggtcggaagaggcataaattccgtcagccagtttagtctgaccatctcatctgtaacatcattggcaacgctacctttgccatgtttcagaaacaactctggcgcatcgggcttcccatacaatcgatagattgtcgcacctgattgcccgacattatcgcgagcccatttatacccatataaatcagcatccatgttggaatttaatcgcggcctagagcaagacgtttcccgttgaatatggctcatactcttcctttttcaatattattgaagcatttatcagggttattgtctcatgagcggatacatatttgaatgtatttagaaaaataaacaaataggcatgctagcgcagaaacgtcctagaagatgccaggaggatacttagcagagagacaataaggccggagcgaagccgtttttccataggctccgcccccctgacgaacatcacgaaatctgacgctcaaatcagtggtggcgaaacccgacaggactataaagataccaggcgtttccccctgatggctccctcttgcgctctcctgttcccgtcctgcggcgtccgtgttgtggtggaggctttacccaaatcaccacgtcccgttccgtgtagacagttcgctccaagctgggctgtgtgcaagaaccccccgttcagcccgactgctgcgccttatccggtaactatcatcttgagtccaacccggaaagacacgacaaaacgccactggcagcagccattggtaactgagaattagtggatttagatatcgagagtcttgaagtggtggcctaacagaggctacactgaaaggacagtatttggtatctgcgctccactaaagccagttaccaggttaagcagttccccaactgacttaaccttcgatcaaaccgcctccccaggcggttttttcgtttacagagcaggagattacgacgatcgtaaaaggatctcaagaagatcctttacggattcccgacaccatcactctagat

SEQ ID NO: 132 - DNA, 6890 bp, Artificial Sequence
  Synthetic
ttcagtgcaatttatctcttcaaatgtagcacctgaagtcagccccatacgatataagttgtaattctcatgttagtcatgccccgcgcccaccggaaggagctgactgggttgaaggctctcaagggcatcggtcgagatcccggtgcctaatgagtgagctaacttacattaattgcgttgcgctcactgcccgctttccagtcgggaaacctgtcgtgccagctgcattaatgaatcggccaacgcgcggggagaggcggtttgcgtattgggcgccagggtggtttttcttttcaccagtgagacgggcaacagctgattgcccttcaccgcctggccctgagagagttgcagcaagcggtccacgctggtttgccccagcaggcgaaaatcctgtttgatggtggttaacggcgggatataacatgagctgtcttcggtatcgtcgtatcccactaccgagatgtccgcaccaacgcgcagcccggactcggtaatggcgcgcattgcgcccagcgccatctgatcgttggcaaccagcatcgcagtgggaacgatgccctcattcagcatttgcatggtttgttgaaaaccggacatggcactccagtcgccttcccgttccgctatcggctgaatttgattgcgagtgagatatttatgccagccagccagacgcagacgcgccgagacagaacttaatgggcccgctaacagcgcgatttgctggtgacccaatgcgaccagatgctccacgcccagtcgcgtaccgtcttcatgggagaaaataatactgttgatgggtgtctggtcagagacatcaagaaataacgccggaacattagtgcaggcagcttccacagcaatggcatcctggtcatccagcggatagttaatgatcagcccactgacgcgttgcgcgagaagattgtgcaccgccgctttacaggcttcgacgccgcttcgttctaccatcgacaccaccacgctggcacccagttgatcggcgcgagatttaatcgccgcgacaatttgcgacggcgcgtgcagggccagactggaggtggcaacgccaatcagcaacgactgtttgcccgccagttgttgtgccacgcggttgggaatgtaattcagctccgccatcgccgcttccactttttcccgcgttttcgcagaaacgtggctggcctggttcaccacgcgggaaacggtctgataagagacaccggcatactctgcgacatcgtataacgttactggtttcacattcaccaccctgaattgactctcttccgggcgctatcatgccataccgcgaaaggttttgcgccattcgatggtgtccgggatctcgacgctctcccttatgcgactcctgcattaggaaattaatacgactcactataggggaattgtgagcggataacaattcccctgtagaaataattttgtttaactttaataaggagatataccatggcgacaagtttacctacgccctcagcaattacgacttcggcgttagagtatgcattccatactcccgctcgcaatctaacgaaatctcgcggaaaaaacattcatcgttatgtcagtgtaaagatgagtaagaggattacggtagaatctactctagagtgtgatgcctgctatcactttgattttgagccaagtattgttcgcttttgcgctcaaccgattcgatttttatattatctcaatggtcagtctcactcctatgttcctgactttctagttcaatttgataccaacgagtttgttctatatgaagtaaagtcagcttatgctaagaacaaacctgattttgatgttgaatgggaggcgaaagtaaaagcagcaactgaactagggctagaattggagcttgttgaagagagtgatattagggatacggttgtattaaataatcttaagcgcatgcatcgttatgcttcgaaagatgagctgaataacgtacataactctctcttaaaaataataaagtacaatggcgcccaatctgcaagatgcttgggagaacagttgggtttaaaaggccgaactgttttaccaattttgtgcgatttgctgtcaaggtgtttactcgatacacgtttggataagcctctatctcttgaatctcgatttgagttggccagttatggcgctaagaaagggttctcaagtttccatagaaaagcagtctcttcccaagatacgcttgaatcgatagagcttgtctctagcgctaattgtctagaaagtgttacgtatcaagatatatcagcatttcccgaaacaattgcggtagagattaatttccgattaagcattcttcgctttttagcgcgaaagtgcgaaaccattgtggccaaatcaattgaaccacatcgtgtagagctacagcaaaactatagtagaaaaatacccagtgcaataacgatatatcgatggtggcttgcttttcgaaaatcagactacaaccccattagcttagcacctaatatcaaggatagaggtaatagagagacaaaagtgtcaacagttgttgattctattatggaacaggcagttgaaagagttatatctggacgaaaagtcaatgttagctctgcatataaacgtgttcgacgaaaagttcgtcaatacaatctaactcatggaacgaaatacacgtatcctaagtacgaatctgtaagaaagcgagtaaaaaagaaaaccccatttgagttattagccgcagggaaaggggagagagtagctaagagagagtttcgccgaatgggaaaaaagatcctcacgtctagcgtgctagagagggttgaaatagatcacactgtcgttgacctttttgcagtacacgaagagtatcgaatcccattgggccgaccttggcttactcaattggttgattgttacagtaaagctgtaatcggtttttatttaggtttcgagcctcctagctatgtgtcggtttcccttgcacttaagaatgcaatacaacgcaaagatgacttaatctcctcgtatgaatcgatcgagaatgaatggctatgttatggcatcccagacctactcgtaactgataatggtaaagagtttttgtcgaaagcatttgatcaagcatgtgaatcactattgatcaatgtgcatcaaaataaagttgagacgcccgacaacaaacctcatgttgaacgtaactacgggactattaatacttctctgttagacgatttacctgggaaatccttcagccagtaccttcaaagagaagggtacgactctgtgggagaagctacccttacactcaatgagattagagaaatttacttaatttggttggtggatatttatcataaaaaacccaatcagagaggcactaattgtcctaatgttgcgtggaaaaagggttgtcaagaatgggaaccagaggagttctctggttctaaagacgaattagactttaaatttgctattgttgattacaaacaacttactaaagtagggataactgtctacaaagaactgagttatagcaatgaccgtttagctgaatatagagggaagaaaggaaaccataaagttcagttcaagtataaccctgagtgtatggcagttatttgggtgttggatgaggatatgaatgagtactttacagttaatgcgattgactacgaatatgcaagtagagtatcactttggcaacataaatataacatgaaatatcaagcagaactaaattcagcagaatatgatgaggacaaggaaattgatgcagaaataaaaattgaagaaatcgcagatcgttcaattgttaagactaacaaaatcagagctcggaggcgtggcgctaggcatcaagagaatagcgcaagggctaagtcaatcagtaatgcgaacccggcctcgatacaaaaacatgaagatgaaatcgttagtgcagataatgacgattgggatattgattatgtcggttccggacccaagaaaaagcgcaaggtctgagaaatcgtcaaatgagtgaaacgcgtgaggctcgtatatcaagagctaaaagggcatttgtatccacaccgagcgttaggaaaatcttgagttacatggatagatgtagagatctatcagacctagagtctgagcctacatgcatgatggtctatggtgcttcgggtgtaggtaaaacgaccgtcatcaagaaatacttaaatcaaaacagaagagagtccgaagccgggggcgatataataccggttttgcatattgagttgccagacaatgcgaagccagtagatgcagcaagggaattgctggttgaaatgggtgacccgctagcactttatgaaactgacttagctagattgacgaaaagactgactgaattaatccctgcggtcggcgtgaagctgattattatcgatgagttccaacatttggtggaagaaaggtcaaatcgggttcttacccaagtaggtaattggctaaaaatgatacttaacaaaacgaaatgtccaattgttatatttggtatgccatactcaaaagttgtactgcaagcaaactcgcaacttcacgggcgattttccattcaggttgaactgcgcccctttagctaccagggaggtagaggtgtatttaaaacttttttggaataccttgataaagccctaccttttgaaaaacaggctggcttagccaacgaaagtttgcagaaaaaattgtatgcattctctcagggaaacatgcgttcgttgagaaaccttatttatcaagcatctatcgaagcaattgataatcagcatgagacgataaccgaagaagatttcgtttttgcatcgaagttgacatcgggcgataaacccaactcatggaaaaatccttttgaggagggtgttgaggtaacagaagatatgttacgaccgccaccaaaagatattggttgggaggactatttgagacattcaaccccgagagtgagtaaaccaggtagaaataaaaactttttcgaataacctaggctgctgccaccgctgagcaataactagcataaccccttggggcctctaaacgggtcttgaggggttttttgctgaaacctcaggcatttgagaagcacacggtcacactgcttccggtagtcaataaaccggtaaaccagcaatagacataagcggctatttaacgaccctgccctgaaccgacgacaagctgacgaccgggtctccgcaagtggcacttttcggggaaatgtgcgcggaacccctatttgtttatttttctaaatacattcaaatatgtatccgctcatgaattaattcttagaaaaactcatcgagcatcaaatgaaactgcaatttattcatatcaggattatcaataccatatttttgaaaaagccgtttctgtaatgaaggagaaaactcaccgaggcagttccataggatggcaagatcctggtatcggtctgcgattccgactcgtccaacatcaatacaacctattaatttcccctcgtcaaaaataaggttatcaagtgagaaatcaccatgagtgacgactgaatccggtgagaatggcaaaagtttatgcatttctttccagacttgttcaacaggccagccattacgctcgtcatcaaaatcactcgcatcaaccaaaccgttattcattcgtgattgcgcctgagcgagacgaaatacgcggtcgctgttaaaaggacaattacaaacaggaatcgaatgcaaccggcgcaggaacactgccagcgcatcaacaatattttcacctgaatcaggatattcttctaatacctggaatgctgttttcccggggatcgcagtggtgagtaaccatgcatcatcaggagtacggataaaatgcttgatggtcggaagaggcataaattccgtcagccagtttagtctgaccatctcatctgtaacatcattggcaacgctacctttgccatgtttcagaaacaactctggcgcatcgggcttcccatacaatcgatagattgtcgcacctgattgcccgacattatcgcgagcccatttatacccatataaatcagcatccatgttggaatttaatcgcggcctagagcaagacgtttcccgttgaatatggctcatactcttcctttttcaatattattgaagcatttatcagggttattgtctcatgagcggatacatatttgaatgtatttagaaaaataaacaaataggcatgctagcgcagaaacgtcctagaagatgccaggaggatacttagcagagagacaataaggccggagcgaagccgtttttccataggctccgcccccctgacgaacatcacgaaatctgacgctcaaatcagtggtggcgaaacccgacaggactataaagataccaggcgtttccccctgatggctccctcttgcgctctcctgttcccgtcctgcggcgtccgtgttgtggtggaggctttacccaaatcaccacgtcccgttccgtgtagacagttcgctccaagctgggctgtgtgcaagaaccccccgttcagcccgactgctgcgccttatccggtaactatcatcttgagtccaacccggaaagacacgacaaaacgccactggcagcagccattggtaactgagaattagtggatttagatatcgagagtcttgaagtggtggcctaacagaggctacactgaaaggacagtatttggtatctgcgctccactaaagccagttaccaggttaagcagttccccaactgacttaaccttcgatcaaaccgcctccccaggcggttttttcgtttacagagcaggagattacgacgatcgtaaaaggatctcaagaagatcctttacggattcccgacaccatcactctagat

SEQ ID NO: 133 - DNA, 6896 bp, Artificial Sequence
  Synthetic
ttcagtgcaatttatctcttcaaatgtagcacctgaagtcagccccatacgatataagttgtaattctcatgttagtcatgccccgcgcccaccggaaggagctgactgggttgaaggctctcaagggcatcggtcgagatcccggtgcctaatgagtgagctaacttacattaattgcgttgcgctcactgcccgctttccagtcgggaaacctgtcgtgccagctgcattaatgaatcggccaacgcgcggggagaggcggtttgcgtattgggcgccagggtggtttttcttttcaccagtgagacgggcaacagctgattgcccttcaccgcctggccctgagagagttgcagcaagcggtccacgctggtttgccccagcaggcgaaaatcctgtttgatggtggttaacggcgggatataacatgagctgtcttcggtatcgtcgtatcccactaccgagatgtccgcaccaacgcgcagcccggactcggtaatggcgcgcattgcgcccagcgccatctgatcgttggcaaccagcatcgcagtgggaacgatgccctcattcagcatttgcatggtttgttgaaaaccggacatggcactccagtcgccttcccgttccgctatcggctgaatttgattgcgagtgagatatttatgccagccagccagacgcagacgcgccgagacagaacttaatgggcccgctaacagcgcgatttgctggtgacccaatgcgaccagatgctccacgcccagtcgcgtaccgtcttcatgggagaaaataatactgttgatgggtgtctggtcagagacatcaagaaataacgccggaacattagtgcaggcagcttccacagcaatggcatcctggtcatccagcggatagttaatgatcagcccactgacgcgttgcgcgagaagattgtgcaccgccgctttacaggcttcgacgccgcttcgttctaccatcgacaccaccacgctggcacccagttgatcggcgcgagatttaatcgccgcgacaatttgcgacggcgcgtgcagggccagactggaggtggcaacgccaatcagcaacgactgtttgcccgccagttgttgtgccacgcggttgggaatgtaattcagctccgccatcgccgcttccactttttcccgcgttttcgcagaaacgtggctggcctggttcaccacgcgggaaacggtctgataagagacaccggcatactctgcgacatcgtataacgttactggtttcacattcaccaccctgaattgactctcttccgggcgctatcatgccataccgcgaaaggttttgcgccattcgatggtgtccgggatctcgacgctctcccttatgcgactcctgcattaggaaattaatacgactcactataggggaattgtgagcggataacaattcccctgtagaaataattttgtttaactttaataaggagatataccatggggcctaagaaaaagcggaaggtgggttccggaatggcgacaagtttacctacgccctcagcaattacgacttcggcgttagagtatgcattccatactcccgctcgcaatctaacgaaatctcgcggaaaaaacattcatcgttatgtcagtgtaaagatgagtaagaggattacggtagaatctactctagagtgtgatgcctgctatcactttgattttgagccaagtattgttcgcttttgcgctcaaccgattcgatttttatattatctcaatggtcagtctcactcctatgttcctgactttctagttcaatttgataccaacgagtttgttctatatgaagtaaagtcagcttatgctaagaacaaacctgattttgatgttgaatgggaggcgaaagtaaaagcagcaactgaactagggctagaattggagcttgttgaagagagtgatattagggatacggttgtattaaataatcttaagcgcatgcatcgttatgcttcgaaagatgagctgaataacgtacataactctctcttaaaaataataaagtacaatggcgcccaatctgcaagatgcttgggagaacagttgggtttaaaaggccgaactgttttaccaattttgtgcgatttgctgtcaaggtgtttactcgatacacgtttggataagcctctatctcttgaatctcgatttgagttggccagttatggcgctaagaaagggttctcaagtttccatagaaaagcagtctcttcccaagatacgcttgaatcgatagagcttgtctctagcgctaattgtctagaaagtgttacgtatcaagatatatcagcatttcccgaaacaattgcggtagagattaatttccgattaagcattcttcgctttttagcgcgaaagtgcgaaaccattgtggccaaatcaattgaaccacatcgtgtagagctacagcaaaactatagtagaaaaatacccagtgcaataacgatatatcgatggtggcttgcttttcgaaaatcagactacaaccccattagcttagcacctaatatcaaggatagaggtaatagagagacaaaagtgtcaacagttgttgattctattatggaacaggcagttgaaagagttatatctggacgaaaagtcaatgttagctctgcatataaacgtgttcgacgaaaagttcgtcaatacaatctaactcatggaacgaaatacacgtatcctaagtacgaatctgtaagaaagcgagtaaaaaagaaaaccccatttgagttattagccgcagggaaaggggagagagtagctaagagagagtttcgccgaatgggaaaaaagatcctcacgtctagcgtgctagagagggttgaaatagatcacactgtcgttgacctttttgcagtacacgaagagtatcgaatcccattgggccgaccttggcttactcaattggttgattgttacagtaaagctgtaatcggtttttatttaggtttcgagcctcctagctatgtgtcggtttcccttgcacttaagaatgcaatacaacgcaaagatgacttaatctcctcgtatgaatcgatcgagaatgaatggctatgttatggcatcccagacctactcgtaactgataatggtaaagagtttttgtcgaaagcatttgatcaagcatgtgaatcactattgatcaatgtgcatcaaaataaagttgagacgcccgacaacaaacctcatgttgaacgtaactacgggactattaatacttctctgttagacgatttacctgggaaatccttcagccagtaccttcaaagagaagggtacgactctgtgggagaagctacccttacactcaatgagattagagaaatttacttaatttggttggtggatatttatcataaaaaacccaatcagagaggcactaattgtcctaatgttgcgtggaaaaagggttgtcaagaatgggaaccagaggagttctctggttctaaagacgaattagactttaaatttgctattgttgattacaaacaacttactaaagtagggataactgtctacaaagaactgagttatagcaatgaccgtttagctgaatatagagggaagaaaggaaaccataaagttcagttcaagtataaccctgagtgtatggcagttatttgggtgttggatgaggatatgaatgagtactttacagttaatgcgattgactacgaatatgcaagtagagtatcactttggcaacataaatataacatgaaatatcaagcagaactaaattcagcagaatatgatgaggacaaggaaattgatgcagaaataaaaattgaagaaatcgcagatcgttcaattgttaagactaacaaaatcagagctcggaggcgtggcgctaggcatcaagagaatagcgcaagggctaagtcaatcagtaatgcgaacccggcctcgatacaaaaacatgaagatgaaatcgttagtgcagataatgacgattgggatattgattatgtctgagaaatcgtcaaatgagtgaaacgcgtgaggctcgtatatcaagagctaaaagggcatttgtatccacaccgagcgttaggaaaatcttgagttacatggatagatgtagagatctatcagacctagagtctgagcctacatgcatgatggtctatggtgcttcgggtgtaggtaaaacgaccgtcatcaagaaatacttaaatcaaaacagaagagagtccgaagccgggggcgatataataccggttttgcatattgagttgccagacaatgcgaagccagtagatgcagcaagggaattgctggttgaaatgggtgacccgctagcactttatgaaactgacttagctagattgacgaaaagactgactgaattaatccctgcggtcggcgtgaagctgattattatcgatgagttccaacatttggtggaagaaaggtcaaatcgggttcttacccaagtaggtaattggctaaaaatgatacttaacaaaacgaaatgtccaattgttatatttggtatgccatactcaaaagttgtactgcaagcaaactcgcaacttcacgggcgattttccattcaggttgaactgcgcccctttagctaccagggaggtagaggtgtatttaaaacttttttggaataccttgataaagccctaccttttgaaaaacaggctggcttagccaacgaaagtttgcagaaaaaattgtatgcattctctcagggaaacatgcgttcgttgagaaaccttatttatcaagcatctatcgaagcaattgataatcagcatgagacgataaccgaagaagatttcgtttttgcatcgaagttgacatcgggcgataaacccaactcatggaaaaatccttttgaggagggtgttgaggtaacagaagatatgttacgaccgccaccaaaagatattggttgggaggactatttgagacattcaaccccgagagtgagtaaaccaggtagaaataaaaactttttcgaataacctaggctgctgccaccgctgagcaataactagcataaccccttggggcctctaaacgggtcttgaggggttttttgctgaaacctcaggcatttgagaagcacacggtcacactgcttccggtagtcaataaaccggtaaaccagcaatagacataagcggctatttaacgaccctgccctgaaccgacgacaagctgacgaccgggtctccgcaagtggcacttttcggggaaatgtgcgcggaacccctatttgtttatttttctaaatacattcaaatatgtatccgctcatgaattaattcttagaaaaactcatcgagcatcaaatgaaactgcaatttattcatatcaggattatcaataccatatttttgaaaaagccgtttctgtaatgaaggagaaaactcaccgaggcagttccataggatggcaagatcctggtatcggtctgcgattccgactcgtccaacatcaatacaacctattaatttcccctcgtcaaaaataaggttatcaagtgagaaatcaccatgagtgacgactgaatccggtgagaatggcaaaagtttatgcatttctttccagacttgttcaacaggccagccattacgctcgtcatcaaaatcactcgcatcaaccaaaccgttattcattcgtgattgcgcctgagcgagacgaaatacgcggtcgctgttaaaaggacaattacaaacaggaatcgaatgcaaccggcgcaggaacactgccagcgcatcaacaatattttcacctgaatcaggatattcttctaatacctggaatgctgttttcccggggatcgcagtggtgagtaaccatgcatcatcaggagtacggataaaatgcttgatggtcggaagaggcataaattccgtcagccagtttagtctgaccatctcatctgtaacatcattggcaacgctacctttgccatgtttcagaaacaactctggcgcatcgggcttcccatacaatcgatagattgtcgcacctgattgcccgacattatcgcgagcccatttatacccatataaatcagcatccatgttggaatttaatcgcggcctagagcaagacgtttcccgttgaatatggctcatactcttcctttttcaatattattgaagcatttatcagggttattgtctcatgagcggatacatatttgaatgtatttagaaaaataaacaaataggcatgctagcgcagaaacgtcctagaagatgccaggaggatacttagcagagagacaataaggccggagcgaagccgtttttccataggctccgcccccctgacgaacatcacgaaatctgacgctcaaatcagtggtggcgaaacccgacaggactataaagataccaggcgtttccccctgatggctccctcttgcgctctcctgttcccgtcctgcggcgtccgtgttgtggtggaggctttacccaaatcaccacgtcccgttccgtgtagacagttcgctccaagctgggctgtgtgcaagaaccccccgttcagcccgactgctgcgccttatccggtaactatcatcttgagtccaacccggaaagacacgacaaaacgccactggcagcagccattggtaactgagaattagtggatttagatatcgagagtcttgaagtggtggcctaacagaggctacactgaaaggacagtatttggtatctgcgctccactaaagccagttaccaggttaagcagttccccaactgacttaaccttcgatcaaaccgcctccccaggcggttttttcgtttacagagcaggagattacgacgatcgtaaaaggatctcaagaagatcctttacggattcccgacaccatcactctagat

SEQ ID NO: 134 - DNA, 4609 bp, Artificial Sequence
  Synthetic
aggacagtatttggtatctgcgctctgctgaagccagttaccttcggaaaaagagttggtagctcttgatccggcaaacaaaccaccgctggtagcggtggtttttttgtttgcaagcagcagattacgcgcagaaaaaaaggatctcaagaagatcctttgatcttttctacggggtctgacgctcagtggaacgaaaactcacgttaagggattttggtcatgagattatcaaaaaggatcttcacctagatccttttaaattaaaaatgaagttttaaatcaatctaaagtatatatgagtaaacttggtctgacagttaccaatgcttaatcagtgaggcacctatctcagcgatctgtctatttcgttcatccatagttgcctgactccccgtcgtgtagataactacgatacgggagggcttaccatctggccccagtgctgcaatgataccgcgagacccacgctcaccggctccagatttatcagcaataaaccagccagccggaagggccgagcgcagaagtggtcctgcaactttatccgcctccatccagtctattaattgttgccgggaagctagagtaagtagttcgccagttaatagtttgcgcaacgttgttgccattgctacaggcatcgtggtgtcacgctcgtcgtttggtatggcttcattcagctccggttcccaacgatcaaggcgagttacatgatcccccatgttgtgcaaaaaagcggttagctccttcggtcctccgatcgttgtcagaagtaagttggccgcagtgttatcactcatggttatggcagcactgcataattctcttactgtcatgccatccgtaagatgcttttctgtgactggtgagtactcaaccaagtcattctgagaatagtgtatgcggcgaccgagttgctcttgcccggcgtcaatacgggataataccgcgccacatagcagaactttaaaagtgctcatcattggaaaacgttcttcggggcgaaaactctcaaggatcttaccgctgttgagatccagttcgatgtaacccactcgtgcacccaactgatcttcagcatcttttactttcaccagcgtttctgggtgagcaaaaacaggaaggcaaaatgccgcaaaaaagggaataagggcgacacggaaatgttgaatactcatactcttcctttttcattattattgaagcatttatcagggttattgtctcatgagcggatacatatttgaatgtatttagaaaaataaacaaataggggttccgcgcacatttccccgaaaagtgccacctgacgtcgacggatcgggagatctcccgatcccctatggtcgactctcagtacaatctgctctgatgccgcatagttaagccagtatctgctccctgcttgtgtgttggaggtcgctgagtagtgcgcgagcaaaatttaagctacaacaaggcaaggcttgaccgacaattgcatgaagaatctgcttagggttaggcgttttgcgctgcttcgcgatgtacgggccagatatacgcgttgacattgattattgactagttattaatagtaatcaattacggggtcattagttcatagcccatatatggagttccgcgttacataacttacggtaaatggcccgcctggctgaccgcccaacgacccccgcccattgacgtcaataatgacgtatgttcccatagtaacgccaatagggactttccattgacgtcaatgggtggactatttacggtaaactgcccacttggcagtacatcaagtgtatcatatgccaagtacgccccctattgacgtcaatgacggtaaatggcccgcctggcattatgcccagtacatgaccttatgggactttcctacttggcagtacatctacgtattagtcatcgctattaccatggtgatgcggttttggcagtacatcaatgggcgtggatagcggtttgactcacggggatttccaagtctccaccccattgacgtcaatgggagtttgttttggcaccaaaatcaacgggactttccaaaatgtcgtaacaactccgccccattgacgcaaatgggcggtaggcgtgtacggtgggaggtctatataagcagagctctctggctaactagagaacccactgcttactggcttatcgaaattaatacgactcactatagggagacccaagcttggtaccgagctcgggagaattcgccaccatggtgagcaagggcgccgagctgttcaccggcatcgtgcccatcctgatcgagctgaatggcgatgtgaatggccacaagttcagcgtgagcggcgagggcgagggcgatgccacctacggcaagctgaccctgaagttcatctgcaccaccggcaagctgcctgtgccctggcccaccctggtgaccaccctgagctacggcgtgcagtgcttctcacgctaccccgatcacatgaagcagcacgacttcttcaagagcgccatgcctgagggctacatccaggagcgcaccatcttcttcgaggatgacggcaactacaagtcgcgcgccgaggtgaagttcgagggcgataccctggtgaatcgcatcgagctgaccggcaccgatttcaaggaggatggcaacatcctgggcaataagatggagtacaactacaacgcccacaatgtgtacatcatgaccgacaaggccaagaatggcatcaaggtgaacttcaagatccgccacaacatcgaggatggcagcgtgcagctggccgaccactaccagcagaatacccccatcggcgatggccctgtgctgctgcccgataaccactacctgtccacccagagcgccctgtccaaggaccccaacgagaagcgcgatcacatgatctacttcggcttcgtgaccgccgccgccatcacccacggcatggatgagctgtacaagtgagggcccagtctagagggccctattctatagtgtcacctaaatgctagagctcgctgatcagcctcgactgtgccttctagttgccagccatctgttgtttgcccctcccccgtgccttccttgaccctggaaggtgccactcccactgtcctttcctaataaaatgaggaaattgcatcgcattgtctgagtaggtgtcattctattctggggggtggggtggggcaggacagcaagggggaggattgggaagacaatagcaggcatgctggggatgcggtgggctctatggcttctgaggcggaaagaaccagctggggctctagggggtatccccacgcgccctgtagcggcgcattaagcgcggcgggtgtggtggttacgcgcagcgtgaccgctacacttgccagcgccctagcgcccgctcctttcgctttcttcccttcctttctcgccacgttcgccggctttccccgtcaagctctaaatcggggcatccctttagggttccgatttagtgctttacggcacctcgaccccaaaaaacttgattagggtgatggttcacgtagtgggccatcgccctgatagacggtttttcgccctttgacgttggagtccacgttctttaatagtggactcttgttccaaactggaacaacactcaaccctatctcggtctattcttttgatttataagggattttggggatttcggcctattggttaaaaaatgagctgatttaacaaaaatttaacgcgaattaatttataccgtcgacctctagctagagcttggcgtaatcatggtcatagctgtttcctgtgtgaaattgttatccgctcacaattccacacaacatacgagccggaagcataaagtgtaaagcctggggtgcctaatgagtgagctaactcacattaattgcgttgcgctcactgcccgctttccagtcgggaaacctgtcgtgccagctgcattaatgaatcggccaacgcgcggggagaggcggtttgcgtattgggcgctcttccgcttcctcgctcactgactcgctgcgctcggtcgttcggctgcggcgagcggtatcagctcactcaaaggcggtaatacggttatccacagaatcaggggataacgcaggaaagaacatgtgagcaaaaggccagcaaaaggccaggaaccgtaaaaaggccgcgttgctggcgtttttccataggctccgcccccctgacgagcatcacaaaaatcgacgctcaagtcagaggtggcgaaacccgacaggactataaagataccaggcgtttccccctggaagctccctcgtgcgctctcctgttccgaccctgccgcttaccggatacctgtccgcctttctcccttcgggaagcgtggcgctttctcaatgctcacgctgtaggtatctcagttcggtgtaggtcgttcgctccaagctgggctgtgtgcacgaaccccccgttcagcccgaccgctgcgccttatccggtaactatcgtcttgagtccaacccggtaagacacgacttatcgccactggcagcagccactggtaacaggattagcagagcgaggtatgtaggcggtgctacagagttcttgaagtggtggcctaactacggctacactaga

SEQ ID NO: 135 - DNA, 6947 bp, Artificial Sequence
  Synthetic
ttcagtgcaatttatctcttcaaatgtagcacctgaagtcagccccatacgatataagttgtaattctcatgttagtcatgccccgcgcccaccggaaggagctgactgggttgaaggctctcaagggcatcggtcgagatcccggtgcctaatgagtgagctaacttacattaattgcgttgcgctcactgcccgctttccagtcgggaaacctgtcgtgccagctgcattaatgaatcggccaacgcgcggggagaggcggtttgcgtattgggcgccagggtggtttttcttttcaccagtgagacgggcaacagctgattgcccttcaccgcctggccctgagagagttgcagcaagcggtccacgctggtttgccccagcaggcgaaaatcctgtttgatggtggttaacggcgggatataacatgagctgtcttcggtatcgtcgtatcccactaccgagatgtccgcaccaacgcgcagcccggactcggtaatggcgcgcattgcgcccagcgccatctgatcgttggcaaccagcatcgcagtgggaacgatgccctcattcagcatttgcatggtttgttgaaaaccggacatggcactccagtcgccttcccgttccgctatcggctgaatttgattgcgagtgagatatttatgccagccagccagacgcagacgcgccgagacagaacttaatgggcccgctaacagcgcgatttgctggtgacccaatgcgaccagatgctccacgcccagtcgcgtaccgtcttcatgggagaaaataatactgttgatgggtgtctggtcagagacatcaagaaataacgccggaacattagtgcaggcagcttccacagcaatggcatcctggtcatccagcggatagttaatgatcagcccactgacgcgttgcgcgagaagattgtgcaccgccgctttacaggcttcgacgccgcttcgttctaccatcgacaccaccacgctggcacccagttgatcggcgcgagatttaatcgccgcgacaatttgcgacggcgcgtgcagggccagactggaggtggcaacgccaatcagcaacgactgtttgcccgccagttgttgtgccacgcggttgggaatgtaattcagctccgccatcgccgcttccactttttcccgcgttttcgcagaaacgtggctggcctggttcaccacgcgggaaacggtctgataagagacaccggcatactctgcgacatcgtataacgttactggtttcacattcaccaccctgaattgactctcttccgggcgctatcatgccataccgcgaaaggttttgcgccattcgatggtgtccgggatctcgacgctctcccttatgcgactcctgcattaggaaattaatacgactcactataggggaattgtgagcggataacaattcccctgtagaaataattttgtttaactttaataaggagatataccatggcgacaagtttacctacgccctcagcaattacgacttcggcgttagagtatgcattccatactcccgctcgcaatctaacgaaatctcgcggaaaaaacattcatcgttatgtcagtgtaaagatgagtaagaggattacggtagaatctactctagagtgtgatgcctgctatcactttgattttgagccaagtattgttcgcttttgcgctcaaccgattcgatttttatattatctcaatggtcagtctcactcctatgttcctgactttctagttcaatttgataccaacgagtttgttctatatgaagtaaagtcagcttatgctaagaacaaacctgattttgatgttgaatgggaggcgaaagtaaaagcagcaactgaactagggctagaattggagcttgttgaagagagtgatattagggatacggttgtattaaataatcttaagcgcatgcatcgttatgcttcgaaagatgagctgaataacgtacataactctctcttaaaaataataaagtacaatggcgcccaatctgcaagatgcttgggagaacagttgggtttaaaaggccgaactgttttaccaattttgtgcgatttgctgtcaaggtgtttactcgatacacgtttggataagcctctatctcttgaatctcgatttgagttggccagttatggcggcagcggctccggaaaacggacagccgacggaagcgagttcgagtcaccaaagaagaagcggaaagtcggatccggctctggaggcgctaagaaagggttctcaagtttccatagaaaagcagtctcttcccaagatacgcttgaatcgatagagcttgtctctagcgctaattgtctagaaagtgttacgtatcaagatatatcagcatttcccgaaacaattgcggtagagattaatttccgattaagcattcttcgctttttagcgcgaaagtgcgaaaccattgtggccaaatcaattgaaccacatcgtgtagagctacagcaaaactatagtagaaaaatacccagtgcaataacgatatatcgatggtggcttgcttttcgaaaatcagactacaaccccattagcttagcacctaatatcaaggatagaggtaatagagagacaaaagtgtcaacagttgttgattctattatggaacaggcagttgaaagagttatatctggacgaaaagtcaatgttagctctgcatataaacgtgttcgacgaaaagttcgtcaatacaatctaactcatggaacgaaatacacgtatcctaagtacgaatctgtaagaaagcgagtaaaaaagaaaaccccatttgagttattagccgcagggaaaggggagagagtagctaagagagagtttcgccgaatgggaaaaaagatcctcacgtctagcgtgctagagagggttgaaatagatcacactgtcgttgacctttttgcagtacacgaagagtatcgaatcccattgggccgaccttggcttactcaattggttgattgttacagtaaagctgtaatcggtttttatttaggtttcgagcctcctagctatgtgtcggtttcccttgcacttaagaatgcaatacaacgcaaagatgacttaatctcctcgtatgaatcgatcgagaatgaatggctatgttatggcatcccagacctactcgtaactgataatggtaaagagtttttgtcgaaagcatttgatcaagcatgtgaatcactattgatcaatgtgcatcaaaataaagttgagacgcccgacaacaaacctcatgttgaacgtaactacgggactattaatacttctctgttagacgatttacctgggaaatccttcagccagtaccttcaaagagaagggtacgactctgtgggagaagctacccttacactcaatgagattagagaaatttacttaatttggttggtggatatttatcataaaaaacccaatcagagaggcactaattgtcctaatgttgcgtggaaaaagggttgtcaagaatgggaaccagaggagttctctggttctaaagacgaattagactttaaatttgctattgttgattacaaacaacttactaaagtagggataactgtctacaaagaactgagttatagcaatgaccgtttagctgaatatagagggaagaaaggaaaccataaagttcagttcaagtataaccctgagtgtatggcagttatttgggtgttggatgaggatatgaatgagtactttacagttaatgcgattgactacgaatatgcaagtagagtatcactttggcaacataaatataacatgaaatatcaagcagaactaaattcagcagaatatgatgaggacaaggaaattgatgcagaaataaaaattgaagaaatcgcagatcgttcaattgttaagactaacaaaatcagagctcggaggcgtggcgctaggcatcaagagaatagcgcaagggctaagtcaatcagtaatgcgaacccggcctcgatacaaaaacatgaagatgaaatcgttagtgcagataatgacgattgggatattgattatgtctgagaaatcgtcaaatgagtgaaacgcgtgaggctcgtatatcaagagctaaaagggcatttgtatccacaccgagcgttaggaaaatcttgagttacatggatagatgtagagatctatcagacctagagtctgagcctacatgcatgatggtctatggtgcttcgggtgtaggtaaaacgaccgtcatcaagaaatacttaaatcaaaacagaagagagtccgaagccgggggcgatataataccggttttgcatattgagttgccagacaatgcgaagccagtagatgcagcaagggaattgctggttgaaatgggtgacccgctagcactttatgaaactgacttagctagattgacgaaaagactgactgaattaatccctgcggtcggcgtgaagctgattattatcgatgagttccaacatttggtggaagaaaggtcaaatcgggttcttacccaagtaggtaattggctaaaaatgatacttaacaaaacgaaatgtccaattgttatatttggtatgccatactcaaaagttgtactgcaagcaaactcgcaacttcacgggcgattttccattcaggttgaactgcgcccctttagctaccagggaggtagaggtgtatttaaaacttttttggaataccttgataaagccctaccttttgaaaaacaggctggcttagccaacgaaagtttgcagaaaaaattgtatgcattctctcagggaaacatgcgttcgttgagaaaccttatttatcaagcatctatcgaagcaattgataatcagcatgagacgataaccgaagaagatttcgtttttgcatcgaagttgacatcgggcgataaacccaactcatggaaaaatccttttgaggagggtgttgaggtaacagaagatatgttacgaccgccaccaaaagatattggttgggaggactatttgagacattcaaccccgagagtgagtaaaccaggtagaaataaaaactttttcgaataacctaggctgctgccaccgctgagcaataactagcataaccccttggggcctctaaacgggtcttgaggggttttttgctgaaacctcaggcatttgagaagcacacggtcacactgcttccggtagtcaataaaccggtaaaccagcaatagacataagcggctatttaacgaccctgccctgaaccgacgacaagctgacgaccgggtctccgcaagtggcacttttcggggaaatgtgcgcggaacccctatttgtttatttttctaaatacattcaaatatgtatccgctcatgaattaattcttagaaaaactcatcgagcatcaaatgaaactgcaatttattcatatcaggattatcaataccatatttttgaaaaagccgtttctgtaatgaaggagaaaactcaccgaggcagttccataggatggcaagatcctggtatcggtctgcgattccgactcgtccaacatcaatacaacctattaatttcccctcgtcaaaaataaggttatcaagtgagaaatcaccatgagtgacgactgaatccggtgagaatggcaaaagtttatgcatttctttccagacttgttcaacaggccagccattacgctcgtcatcaaaatcactcgcatcaaccaaaccgttattcattcgtgattgcgcctgagcgagacgaaatacgcggtcgctgttaaaaggacaattacaaacaggaatcgaatgcaaccggcgcaggaacactgccagcgcatcaacaatattttcacctgaatcaggatattcttctaatacctggaatgctgttttcccggggatcgcagtggtgagtaaccatgcatcatcaggagtacggataaaatgcttgatggtcggaagaggcataaattccgtcagccagtttagtctgaccatctcatctgtaacatcattggcaacgctacctttgccatgtttcagaaacaactctggcgcatcgggcttcccatacaatcgatagattgtcgcacctgattgcccgacattatcgcgagcccatttatacccatataaatcagcatccatgttggaatttaatcgcggcctagagcaagacgtttcccgttgaatatggctcatactcttcctttttcaatattattgaagcatttatcagggttattgtctcatgagcggatacatatttgaatgtatttagaaaaataaacaaataggcatgctagcgcagaaacgtcctagaagatgccaggaggatacttagcagagagacaataaggccggagcgaagccgtttttccataggctccgcccccctgacgaacatcacgaaatctgacgctcaaatcagtggtggcgaaacccgacaggactataaagataccaggcgtttccccctgatggctccctcttgcgctctcctgttcccgtcctgcggcgtccgtgttgtggtggaggctttacccaaatcaccacgtcccgttccgtgtagacagttcgctccaagctgggctgtgtgcaagaaccccccgttcagcccgactgctgcgccttatccggtaactatcatcttgagtccaacccggaaagacacgacaaaacgccactggcagcagccattggtaactgagaattagtggatttagatatcgagagtcttgaagtggtggcctaacagaggctacactgaaaggacagtatttggtatctgcgctccactaaagccagttaccaggttaagcagttccccaactgacttaaccttcgatcaaaccgcctccccaggcggttttttcgtttacagagcaggagattacgacgatcgtaaaaggatctcaagaagatcctttacggattcccgacaccatcactctagat

SEQ ID NO: 136 - DNA, 4868 bp, Artificial Sequence
  Synthetic
agcgcccaatacgcaaaccgcctctccccgcgcgttggccgattcattaatgcagctggcacgacaggtttcccgactggaaagcgggcagtgagcgcaacgcaattaatgtgagttagctcactcattaggcaccccaggctttacactttatgcttccggctcgtatgttgtgtggaattgtgagcggataacaatttcacacaggaaacagctatgaccatgattacgccaagctatttaggtgacactatagaatactcaagctatgcatcaagcttggtaccgagctcggatccactagtaacggccgccagtgtgctggaattcgccctttattaccgcctttgagtgagctgataccgctcgccgcagccgaacgaccgagcgcagcgagtcagtgagcgaggaagctcgaggcagtgaaaaaaatgctttatttgtgaaatttgtgatgctattgctttatttgtaaccattataagctgcaataaacaagttaacaacaacaattgcattcattttatgtttcaggttcagggggaggtgtgggaggttttttaaagcaagtaaaacctctacaaatgtggtatggctgattatgatcctctagagatatcgtcgacaagcttatcgatgcggccgcgctagcacgcgtcagctgactagaggatccccgggtaccgagctcgaattcttacttgtacagctcgtccatgccgtacaggaacaggtggtggcggccctcggagcgctcgtactgttccacgatggtgtagtcctcgttgtgggaggtgatgtccagcttggtgtccacgtagtagtagccgggcagttgcacgggcttcttggccatgtagatggtcttgaactccaccaggtagtggccgccgtccttcagcttcagggcctggtggatctcgcccttcagcacgccgtcgcgggggtacaggcgctcggtggaggcctcccagcccatggtcttcttctgcattacggggccgtcgggggggaagttggtgccgcgcatcttcaccttgtagatcagcgtgccgtcctgcagggaggagtcctgggtcacggtcaccagaccgccgtcctcgaagttcatcacgcgctcccacttgaagccctcggggaaggacagcttcttgtaatcggggatgtcggcggggtgcttcacgtacgccttggagccgtacatgaactggggggacaggatgtcccaggcgaagggcagggggccgcccttggtcaccttcagcttggcggtctgggtgccctcgtaggggcggccctcgccctcgccctcgatctcgaactcgtggccgttcatggagccctccatgcgcaccttgaagcgcatgaactctttgatgacctcctcgcccttgctcacggtggaacccagtccgccaccggaagttttatcgtcgtcatccttgtagtccatggtggcgaattctccaggcgatctgacggttcactaaacgagctctgcttatataggcctcccaccgtacacgcctacctcgtgttgatacaaccataaaatgataattacacccataaattgataattatcacacccataaattgatattgcctcttcatggtctaaacttcagtaagtttacgacattttcatgaagaggtcatttccgactattaccctgttatccctaaagggcgaattctgcagatatccatcacactggcggccgctcgagcatgcatctagagggcccaattcgccctatagtgagtcgtattacaattcactggccgtcgttttacaacgtcgtgactgggaaaaccctggcgttacccaacttaatcgccttgcagcacatccccctttcgccagctggcgtaatagcgaagaggcccgcaccgatcgcccttcccaacagttgcgcagcctatacgtacggcagtttaaggtttacacctataaaagagagagccgttatcgtctgtttgtggatgtacagagtgatattattgacacgccggggcgacggatggtgatccccctggccagtgcacgtctgctgtcagataaagtctcccgtgaactttacccggtggtgcatatcggggatgaaagctggcgcatgatgaccaccgatatggccagtgtgccggtctccgttatcggggaagaagtggctgatctcagccaccgcgaaaatgacatcaaaaacgccattaacctgatgttctggggaatataaatgtcaggcatgagattatcaaaaaggatcttcacctagatccttttcacgtagaaagccagtccgcagaaacggtgctgaccccggatgaatgtcagctactgggctatctggacaagggaaaacgcaagcgcaaagagaaagcaggtagcttgcagtgggcttacatggcgatagctagactgggcggttttatggacagcaagcgaaccggaattgccagctggggcgccctctggtaaggttgggaagccctgcaaagtaaactggatggctttctcgccgccaaggatctgatggcgcaggggatcaagctctgatcaagagacaggatgaggatcgtttcgcatgattgaacaagatggattgcacgcaggttctccggccgcttgggtggagaggctattcggctatgactgggcacaacagacaatcggctgctctgatgccgccgtgttccggctgtcagcgcaggggcgcccggttctttttgtcaagaccgacctgtccggtgccctgaatgaactgcaagacgaggcagcgcggctatcgtggctggccacgacgggcgttccttgcgcagctgtgctcgacgttgtcactgaagcgggaagggactggctgctattgggcgaagtgccggggcaggatctcctgtcatctcaccttgctcctgccgagaaagtatccatcatggctgatgcaatgcggcggctgcatacgcttgatccggctacctgcccattcgaccaccaagcgaaacatcgcatcgagcgagcacgtactcggatggaagccggtcttgtcgatcaggatgatctggacgaagagcatcaggggctcgcgccagccgaactgttcgccaggctcaaggcgagcatgcccgacggcgaggatctcgtcgtgacccatggcgatgcctgcttgccgaatatcatggtggaaaatggccgcttttctggattcatcgactgtggccggctgggtgtggcggaccgctatcaggacatagcgttggctacccgtgatattgctgaagagcttggcggcgaatgggctgaccgcttcctcgtgctttacggtatcgccgctcccgattcgcagcgcatcgccttctatcgccttcttgacgagttcttctgaattattaacgcttacaatttcctgatgcggtattttctccttacgcatctgtgcggtatttcacaccgcatacaggtggcacttttcggggaaatgtgcgcggaacccctatttgtttatttttctaaatacattcaaatatgtatccgctcatgagacaataaccctgataaatgcttcaataatagcacgtgaggagggccaccatggccaagttgaccagtgccgttccggtgctcaccgcgcgcgacgtcgccggagcggtcgagttctggaccgaccggctcgggttctcccgggacttcgtggaggacgacttcgccggtgtggtccgggacgacgtgaccctgttcatcagcgcggtccaggaccaggtggtgccggacaacaccctggcctgggtgtgggtgcgcggcctggacgagctgtacgccgagtggtcggaggtcgtgtccacgaacttccgggacgcctccgggccggccatgaccgagatcggcgagcagccgtgggggcgggagttcgccctgcgcgacccggccggcaactgcgtgcacttcgtggccgaggagcaggactgacacgtgctaaaacttcatttttaatttaaaaggatctaggtgaagatcctttttgataatctcatgaccaaaatcccttaacgtgagttttcgttccactgagcgtcagaccccgtagaaaagatcaaaggatcttcttgagatcctttttttctgcgcgtaatctgctgcttgcaaacaaaaaaaccaccgctaccagcggtggtttgtttgccggatcaagagctaccaactctttttccgaaggtaactggcttcagcagagcgcagataccaaatactgtccttctagtgtagccgtagttaggccaccacttcaagaactctgtagcaccgcctacatacctcgctctgctaatcctgttaccagtggctgctgccagtggcgataagtcgtgtcttaccgggttggactcaagacgatagttaccggataaggcgcagcggtcgggctgaacggggggttcgtgcacacagcccagcttggagcgaacgacctacaccgaactgagatacctacagcgtgagctatgagaaagcgccacgcttcccgaagggagaaaggcggacaggtatccggtaagcggcagggtcggaacaggagagcgcacgagggagcttccagggggaaacgcctggtatctttatagtcctgtcgggtttcgccacctctgacttgagcgtcgatttttgtgatgctcgtcaggggggcggagcctatggaaaaacgccagcaacgcggcctttttacggttcctgggcttttgctggccttttgctcacatgttctttcctgcgttatcccctgattctgtggataaccgtattaccgcctttgagtgagctgataccgctcgccgcagccgaacgaccgagcgcagcgagtcagtgagcgaggaagcggaag

SEQ ID NO: 137 - DNA, 4868 bp, Artificial Sequence
  Synthetic
agcgcccaatacgcaaaccgcctctccccgcgcgttggccgattcattaatgcagctggcacgacaggtttcccgactggaaagcgggcagtgagcgcaacgcaattaatgtgagttagctcactcattaggcaccccaggctttacactttatgcttccggctcgtatgttgtgtggaattgtgagcggataacaatttcacacaggaaacagctatgaccatgattacgccaagctatttaggtgacactatagaatactcaagctatgcatcaagcttggtaccgagctcggatccactagtaacggccgccagtgtgctggaattcgccctttattaccgcctttgagtgagctgataccgctcgccgcagccgaacgaccgagcgcagcgagtcagtgagcgaggaagctcgaggcagtgaaaaaaatgctttatttgtgaaatttgtgatgctattgctttatttgtaaccattataagctgcaataaacaagttaacaacaacaattgcattcattttatgtttcaggttcagggggaggtgtgggaggttttttaaagcaagtaaaacctctacaaatgtggtatggctgattatgatcctctagagatatcgtcgacaagcttatcgatgcggccgcgctagcacgcgtcagctgactagaggatccccgggtaccgagctcgaattcttacttgtacagctcgtccatgccgtacaggaacaggtggtggcggccctcggagcgctcgtactgttccacgatggtgtagtcctcgttgtgggaggtgatgtccagcttggtgtccacgtagtagtagccgggcagttgcacgggcttcttggccatgtagatggtcttgaactccaccaggtagtggccgccgtccttcagcttcagggcctggtggatctcgcccttcagcacgccgtcgcgggggtacaggcgctcggtggaggcctcccagcccatggtcttcttctgcattacggggccgtcgggggggaagttggtgccgcgcatcttcaccttgtagatcagcgtgccgtcctgcagggaggagtcctgggtcacggtcaccagaccgccgtcctcgaagttcatcacgcgctcccacttgaagccctcggggaaggacagcttcttgtaatcggggatgtcggcggggtgcttcacgtacgccttggagccgtacatgaactggggggacaggatgtcccaggcgaagggcagggggccgcccttggtcaccttcagcttggcggtctgggtgccctcgtaggggcggccctcgccctcgccctcgatctcgaactcgtggccgttcatggagccctccatgcgcaccttgaagcgcatgaactctttgatgacctcctcgcccttgctcacggtggaacccagtccgccaccggaagttttatcgtcgtcatccttgtagtccatggtggcgaattctccaggcgatctgacggttcactaaacgagctctgcttatataggcctcccaccgtacacgcctacctcgcggaaatgacctcttcatgaaaatgtcgtaaacttactgaagtttagaccatgaagaggcaatatcaatttatgggtgtgataattatcaatttatgggtgtaattatcattttatggttgtatcaacaactattaccctgttatccctaaagggcgaattctgcagatatccatcacactggcggccgctcgagcatgcatctagagggcccaattcgccctatagtgagtcgtattacaattcactggccgtcgttttacaacgtcgtgactgggaaaaccctggcgttacccaacttaatcgccttgcagcacatccccctttcgccagctggcgtaatagcgaagaggcccgcaccgatcgcccttcccaacagttgcgcagcctatacgtacggcagtttaaggtttacacctataaaagagagagccgttatcgtctgtttgtggatgtacagagtgatattattgacacgccggggcgacggatggtgatccccctggccagtgcacgtctgctgtcagataaagtctcccgtgaactttacccggtggtgcatatcggggatgaaagctggcgcatgatgaccaccgatatggccagtgtgccggtctccgttatcggggaagaagtggctgatctcagccaccgcgaaaatgacatcaaaaacgccattaacctgatgttctggggaatataaatgtcaggcatgagattatcaaaaaggatcttcacctagatccttttcacgtagaaagccagtccgcagaaacggtgctgaccccggatgaatgtcagctactgggctatctggacaagggaaaacgcaagcgcaaagagaaagcaggtagcttgcagtgggcttacatggcgatagctagactgggcggttttatggacagcaagcgaaccggaattgccagctggggcgccctctggtaaggttgggaagccctgcaaagtaaactggatggctttctcgccgccaaggatctgatggcgcaggggatcaagctctgatcaagagacaggatgaggatcgtttcgcatgattgaacaagatggattgcacgcaggttctccggccgcttgggtggagaggctattcggctatgactgggcacaacagacaatcggctgctctgatgccgccgtgttccggctgtcagcgcaggggcgcccggttctttttgtcaagaccgacctgtccggtgccctgaatgaactgcaagacgaggcagcgcggctatcgtggctggccacgacgggcgttccttgcgcagctgtgctcgacgttgtcactgaagcgggaagggactggctgctattgggcgaagtgccggggcaggatctcctgtcatctcaccttgctcctgccgagaaagtatccatcatggctgatgcaatgcggcggctgcatacgcttgatccggctacctgcccattcgaccaccaagcgaaacatcgcatcgagcgagcacgtactcggatggaagccggtcttgtcgatcaggatgatctggacgaagagcatcaggggctcgcgccagccgaactgttcgccaggctcaaggcgagcatgcccgacggcgaggatctcgtcgtgacccatggcgatgcctgcttgccgaatatcatggtggaaaatggccgcttttctggattcatcgactgtggccggctgggtgtggcggaccgctatcaggacatagcgttggctacccgtgatattgctgaagagcttggcggcgaatgggctgaccgcttcctcgtgctttacggtatcgccgctcccgattcgcagcgcatcgccttctatcgccttcttgacgagttcttctgaattattaacgcttacaatttcctgatgcggtattttctccttacgcatctgtgcggtatttcacaccgcatacaggtggcacttttcggggaaatgtgcgcggaacccctatttgtttatttttctaaatacattcaaatatgtatccgctcatgagacaataaccctgataaatgcttcaataatagcacgtgaggagggccaccatggccaagttgaccagtgccgttccggtgctcaccgcgcgcgacgtcgccggagcggtcgagttctggaccgaccggctcgggttctcccgggacttcgtggaggacgacttcgccggtgtggtccgggacgacgtgaccctgttcatcagcgcggtccaggaccaggtggtgccggacaacaccctggcctgggtgtgggtgcgcggcctggacgagctgtacgccgagtggtcggaggtcgtgtccacgaacttccgggacgcctccgggccggccatgaccgagatcggcgagcagccgtgggggcgggagttcgccctgcgcgacccggccggcaactgcgtgcacttcgtggccgaggagcaggactgacacgtgctaaaacttcatttttaatttaaaaggatctaggtgaagatcctttttgataatctcatgaccaaaatcccttaacgtgagttttcgttccactgagcgtcagaccccgtagaaaagatcaaaggatcttcttgagatcctttttttctgcgcgtaatctgctgcttgcaaacaaaaaaaccaccgctaccagcggtggtttgtttgccggatcaagagctaccaactctttttccgaaggtaactggcttcagcagagcgcagataccaaatactgtccttctagtgtagccgtagttaggccaccacttcaagaactctgtagcaccgcctacatacctcgctctgctaatcctgttaccagtggctgctgccagtggcgataagtcgtgtcttaccgggttggactcaagacgatagttaccggataaggcgcagcggtcgggctgaacggggggttcgtgcacacagcccagcttggagcgaacgacctacaccgaactgagatacctacagcgtgagctatgagaaagcgccacgcttcccgaagggagaaaggcggacaggtatccggtaagcggcagggtcggaacaggagagcgcacgagggagcttccagggggaaacgcctggtatctttatagtcctgtcgggtttcgccacctctgacttgagcgtcgatttttgtgatgctcgtcaggggggcggagcctatggaaaaacgccagcaacgcggcctttttacggttcctgggcttttgctggccttttgctcacatgttctttcctgcgttatcccctgattctgtggataaccgtattaccgcctttgagtgagctgataccgctcgccgcagccgaacgaccgagcgcagcgagtcagtgagcgaggaagcggaag

SEQ ID NO: 138 - DNA, 7393 bp, Artificial Sequence
  Synthetic
gacggatcgggagatctcccgatcccctatggtcgactctcagtacaatctgctctgatgccgcatagttaagccagtatctgctccctgcttgtgtgttggaggtcgctgagtagtgcgcgagcaaaatttaagctacaacaaggcaaggcttgaccgacaattgcatgaagaatctgcttagggttaggcgttttgcgctgcttcgcgatgtacgggccagatatacgcgttgacattgattattgactagttattaatagtaatcaattacggggtcattagttcatagcccatatatggagttccgcgttacataacttacggtaaatggcccgcctggctgaccgcccaacgacccccgcccattgacgtcaataatgacgtatgttcccatagtaacgccaatagggactttccattgacgtcaatgggtggactatttacggtaaactgcccacttggcagtacatcaagtgtatcatatgccaagtacgccccctattgacgtcaatgacggtaaatggcccgcctggcattatgcccagtacatgaccttatgggactttcctacttggcagtacatctacgtattagtcatcgctattaccatggtgatgcggttttggcagtacatcaatgggcgtggatagcggtttgactcacggggatttccaagtctccaccccattgacgtcaatgggagtttgttttggcaccaaaatcaacgggactttccaaaatgtcgtaacaactccgccccattgacgcaaatgggcggtaggcgtgtacggtgggaggtctatataagcagagctctctggctaactagagaacccactgcttactggcttatcgaaattaatacgactcactatagggagacccaagcttggtaccgagctcggatccgccaccatgggcaaacggacagccgacggaagcgagttcgagtcaccgaaaaagaagcgaaaagttggctccggaatgcagaccctgaaggagctgatcgccagcaaccccgacgatctgaccacagagctgaagagggccttccgccccctgacacctcacatcgccatcgacggcaatgagctggatgccctgaccatcctggtgaacctgacagacaagaccgacgatcagaaggacctgctggatcgggccaagtgtaagcagaagctgagagatgagaagtggtgggcctcctgcatcaactgcgtgaactacaggcagtctcacaacccaaagttccccgacatccgcagcgagggcgtgatcagaacacaggccctgggcgagctgcccagctttctgctgtctagctccaagatcccaccctaccactggtcttatagccacgactctaagtatgtgaataagagcgccttcctgaccaacgagttttgctgggatggcgagatcagctgtctgggcgagctgctgaaggacgccgatcaccctctgtggaacacactgaagaagctgggctgctcccagaaaacctgtaaggcaatggccaagcagctggccgacatcacactgaccacaatcaatgtgaccctggcccccaactacctgacacagatctctctgcctgactccgatacatcttatatctccctgtctcctgtggccagcctgtccatgcagagccacttccaccagaggctccaggatgagaacaggcactccgccatcacccggttcagccggaccacaaatatgggagtgacagcaatgacctgcggaggagccttcaggatgctgaaaagcggcgccaagttttctagccctccacaccaccggctgaacagcaagagatcctggctgacctccgagcatgtgcagtctctgaagcagtaccagcggctgaataagagcctgatcccagagaactccagaatcgccctgcggagaaagtataagatcgagctgcaaaatatggtgcgctcttggttcgccatgcaggaccacacactggatagcaatatcctgatccagcacctgaaccacgacctgtcctacctgggcgccaccaagcggttcgcctatgatcccgccatgacaaagctgtttaccgagctgctgaagagagagctgtctaacagcatcaacaatggcgagcagcacaccaatggcagctttctggtgctgcctaacatcagagtgtgcggagcaaccgccctgtcctctcctgtgacagtgggcatcccatccctgaccgccttctttggcttcgtgcacgcctttgagaggaatatcaaccgcaccacaagctccttcagggtggagagctttgccatctgcgtgcaccagctgcatgtggagaagcgcggcctgacagccgagttcgtggagaagggcgacggaacaatctccgccccagcaaccagggacgattggcagtgtgatgtggtgttctctctgatcctgaataccaactttgcccagcacatcgaccaggatacactcgtcacctctctgccaaagaggctggcaaggggaagcgccaagatcgccatcgacgatttcaagcacatcaactccttttctacactggaaaccgcaatcgagagcctgccaatcgaggcaggcagatggctgagtctgtacgcccagtccaacaataacctgtctgacctgctggccgccatgacagaggatcaccagctgatggccagctgcgtgggctaccacctgctggaggagcctaaagacaagccaaactccctcagaggctataagcacgccatcgccgagtgtatcatcggcctgatcaattccatcaccttctctagcgagacagatcccaacaccatcttttggagcctgaagaattaccagaactatctggtggtgcagcctcgctccatcaatgacgaaaccaccgataagtcctctctgtaattacattggaagtggataatctagagggccctattctatagtgtcacctaaatgctagagctcgctgatcagcctcgactgtgccttctagttgccagccatctgttgtttgcccctcccccgtgccttccttgaccctggaaggtgccactcccactgtcctttcctaataaaatgaggaaattgcatcgcattgtctgagtaggtgtcattctattctggggggtggggtggggcaggacagcaagggggaggattgggaagacaatagcaggcatgctggggatgcggtgggctctatggcttctgaggcggaaagaaccagctggggctctagggggtatccccacgcgccctgtagcggcgcattaagcgcggcgggtgtggtggttacgcgcagcgtgaccgctacacttgccagcgccctagcgcccgctcctttcgctttcttcccttcctttctcgccacgttcgccggctttccccgtcaagctctaaatcggggcatccctttagggttccgatttagtgctttacggcacctcgaccccaaaaaacttgattagggtgatggttcacgtagtgggccatcgccctgatagacggtttttcgccctttgacgttggagtccacgttctttaatagtggactcttgttccaaactggaacaacactcaaccctatctcggtctattcttttgatttataagggattttggggatttcggcctattggttaaaaaatgagctgatttaacaaaaatttaacgcgaattaattctgtggaatgtgtgtcagttagggtgtggaaagtccccaggctccccaggcaggcagaagtatgcaaagcatgcatctcaattagtcagcaaccaggtgtggaaagtccccaggctccccagcaggcagaagtatgcaaagcatgcatctcaattagtcagcaaccatagtcccgcccctaactccgcccatcccgcccctaactccgcccagttccgcccattctccgccccatggctgactaattttttttatttatgcagaggccgaggccgcctctgcctctgagctattccagaagtagtgaggaggcttttttggaggcctaggcttttgcaaaaagctcccgggagcttgtatatccattttcggatctgatcaagagacaggatgaggatcgtttcgcatgattgaacaagatggattgcacgcaggttctccggccgcttgggtggagaggctattcggctatgactgggcacaacagacaatcggctgctctgatgccgccgtgttccggctgtcagcgcaggggcgcccggttctttttgtcaagaccgacctgtccggtgccctgaatgaactgcaggacgaggcagcgcggctatcgtggctggccacgacgggcgttccttgcgcagctgtgctcgacgttgtcactgaagcgggaagggactggctgctattgggcgaagtgccggggcaggatctcctgtcatctcaccttgctcctgccgagaaagtatccatcatggctgatgcaatgcggcggctgcatacgcttgatccggctacctgcccattcgaccaccaagcgaaacatcgcatcgagcgagcacgtactcggatggaagccggtcttgtcgatcaggatgatctggacgaagagcatcaggggctcgcgccagccgaactgttcgccaggctcaaggcgcgcatgcccgacggcgaggatctcgtcgtgacccatggcgatgcctgcttgccgaatatcatggtggaaaatggccgcttttctggattcatcgactgtggccggctgggtgtggcggaccgctatcaggacatagcgttggctacccgtgatattgctgaagagcttggcggcgaatgggctgaccgcttcctcgtgctttacggtatcgccgctcccgattcgcagcgcatcgccttctatcgccttcttgacgagttcttctgagcgggactctggggttcgaaatgaccgaccaagcgacgcccaacctgccatcacgagatttcgattccaccgccgccttctatgaaaggttgggcttcggaatcgttttccgggacgccggctggatgatcctccagcgcggggatctcatgctggagttcttcgcccaccccaacttgtttattgcagcttataatggttacaaataaagcaatagcatcacaaatttcacaaataaagcatttttttcactgcattctagttgtggtttgtccaaactcatcaatgtatcttatcatgtctgtataccgtcgacctctagctagagcttggcgtaatcatggtcatagctgtttcctgtgtgaaattgttatccgctcacaattccacacaacatacgagccggaagcataaagtgtaaagcctggggtgcctaatgagtgagctaactcacattaattgcgttgcgctcactgcccgctttccagtcgggaaacctgtcgtgccagctgcattaatgaatcggccaacgcgcggggagaggcggtttgcgtattgggcgctcttccgcttcctcgctcactgactcgctgcgctcggtcgttcggctgcggcgagcggtatcagctcactcaaaggcggtaatacggttatccacagaatcaggggataacgcaggaaagaacatgtgagcaaaaggccagcaaaaggccaggaaccgtaaaaaggccgcgttgctggcgtttttccataggctccgcccccctgacgagcatcacaaaaatcgacgctcaagtcagaggtggcgaaacccgacaggactataaagataccaggcgtttccccctggaagctccctcgtgcgctctcctgttccgaccctgccgcttaccggatacctgtccgcctttctcccttcgggaagcgtggcgctttctcaatgctcacgctgtaggtatctcagttcggtgtaggtcgttcgctccaagctgggctgtgtgcacgaaccccccgttcagcccgaccgctgcgccttatccggtaactatcgtcttgagtccaacccggtaagacacgacttatcgccactggcagcagccactggtaacaggattagcagagcgaggtatgtaggcggtgctacagagttcttgaagtggtggcctaactacggctacactagaaggacagtatttggtatctgcgctctgctgaagccagttaccttcggaaaaagagttggtagctcttgatccggcaaacaaaccaccgctggtagcggtggtttttttgtttgcaagcagcagattacgcgcagaaaaaaaggatctcaagaagatcctttgatcttttctacggggtctgacgctcagtggaacgaaaactcacgttaagggattttggtcatgagattatcaaaaaggatcttcacctagatccttttaaattaaaaatgaagttttaaatcaatctaaagtatatatgagtaaacttggtctgacagttaccaatgcttaatcagtgaggcacctatctcagcgatctgtctatttcgttcatccatagttgcctgactccccgtcgtgtagataactacgatacgggagggcttaccatctggccccagtgctgcaatgataccgcgagacccacgctcaccggctccagatttatcagcaataaaccagccagccggaagggccgagcgcagaagtggtcctgcaactttatccgcctccatccagtctattaattgttgccgggaagctagagtaagtagttcgccagttaatagtttgcgcaacgttgttgccattgctacaggcatcgtggtgtcacgctcgtcgtttggtatggcttcattcagctccggttcccaacgatcaaggcgagttacatgatcccccatgttgtgcaaaaaagcggttagctccttcggtcctccgatcgttgtcagaagtaagttggccgcagtgttatcactcatggttatggcagcactgcataattctcttactgtcatgccatccgtaagatgcttttctgtgactggtgagtactcaaccaagtcattctgagaatagtgtatgcggcgaccgagttgctcttgcccggcgtcaatacgggataataccgcgccacatagcagaactttaaaagtgctcatcattggaaaacgttcttcggggcgaaaactctcaaggatcttaccgctgttgagatccagttcgatgtaacccactcgtgcacccaactgatcttcagcatcttttactttcaccagcgtttctgggtgagcaaaaacaggaaggcaaaatgccgcaaaaaagggaataagggcgacacggaaatgttgaatactcatactcttcctttttcattattattgaagcatttatcagggttattgtctcatgagcggatacatatttgaatgtatttagaaaaataaacaaataggggttccgcgcacatttccccgaaaagtgccacctgacgtc

SEQ ID NO: 139 - DNA, 7478 bp, Artificial Sequence
  Synthetic
gacggatcgggagatctcccgatcccctatggtcgactctcagtacaatctgctctgatgccgcatagttaagccagtatctgctccctgcttgtgtgttggaggtcgctgagtagtgcgcgagcaaaatttaagctacaacaaggcaaggcttgaccgacaattgcatgaagaatctgcttagggttaggcgttttgcgctgcttcgcgatgtacgggccagatatacgcgttgacattgattattgactagttattaatagtaatcaattacggggtcattagttcatagcccatatatggagttccgcgttacataacttacggtaaatggcccgcctggctgaccgcccaacgacccccgcccattgacgtcaataatgacgtatgttcccatagtaacgccaatagggactttccattgacgtcaatgggtggactatttacggtaaactgcccacttggcagtacatcaagtgtatcatatgccaagtacgccccctattgacgtcaatgacggtaaatggcccgcctggcattatgcccagtacatgaccttatgggactttcctacttggcagtacatctacgtattagtcatcgctattaccatggtgatgcggttttggcagtacatcaatgggcgtggatagcggtttgactcacggggatttccaagtctccaccccattgacgtcaatgggagtttgttttggcaccaaaatcaacgggactttccaaaatgtcgtaacaactccgccccattgacgcaaatgggcggtaggcgtgtacggtgggaggtctatataagcagagctctctggctaactagagaacccactgcttactggcttatcgaaattaatacgactcactatagggagacccaagcttggtaccgagctcggatccctacttccaatccaatgccaccatgggcgccaagaagggcttcagctcctttcaccgcaaggccgtgtctagccaggacaccctggagagcatcgagctggtgtcctctgccaactgcctggagagcgtgacataccaggacatctccgccttccctgaaaccatcgccgtggagatcaatttcagactgagcatcctgagatttctggccaggaagtgtgagacaatcgtggccaagtccatcgagcctcaccgggtggagctgcaacagaactatagccggaagatcccaagcgccatcaccatctaccgctggtggctggcctttcggaaaagcgactataatccaatctccctggcccccaacatcaaggatagaggcaatagggagacaaaggtgtccaccgtggtggactctatcatggagcaggcagtggagcgcgtgatcagcggacggaaggtgaacgtgagttccgcctataagagagtgcggagaaaggtgaggcagtacaatctgacccacggcacaaagtacacctatcccaagtacgagtccgtgagaaagagggtgaagaagaaaacccctttcgagctgctggcagcaggcaagggagagagggtggccaagcgggagtttaggcgcatgggcaagaagatcctgacatctagcgtgctggagcgggtggagatcgaccacaccgtggtggatctgttcgccgtgcacgaggagtatagaatccctctgggcaggccctggctgacccagctggtggactgctactctaaggccgtgatcggcttctatctgggctttgagccccctagctacgtgtctgtgagcctggccctgaagaacgccatccagagaaaggacgatctgatctcctcttatgagagcatcgagaacgagtggctgtgctacggcatcccagacctgctggtgacagataatggcaaggagttcctgagcaaggcctttgaccaggcctgtgagtccctgctgatcaacgtgcaccagaataaggtggagacacccgataataagcctcacgtcgagaggaactacggcacaatcaataccagcctgctggacgatctgcccggcaagtccttctctcagtacctccagagggagggatatgactccgtgggagaggccaccctgacactgaacgagatcagagagatctatctgatctggctggtggatatttaccacaagaagcccaatcagcgcggcaccaactgccctaatgtggcctggaagaagggctgtcaggagtgggagcctgaagagtttagcggctccaaggacgagctggatttcaagtttgccatcgtggactacaagcagctgacaaaagtgggcatcaccgtgtacaaggagctgtcttatagcaacgataggctggcagagtacaggggcaagaagggaaaccacaaggtgcagttcaagtataatccagagtgtatggccgtgatctgggtgctggacgaggatatgaacgagtactttacagtgaatgccatcgattacgagtatgcctctcgggtgagcctgtggcagcacaagtacaacatgaagtatcaggccgagctgaatagcgccgagtatgacgaggataaggagatcgacgccgagatcaagatcgaggagatcgccgatagatccatcgtgaaaaccaacaagatcagggcacggagaaggggagcaagacaccaggagaactctgccagggccaagtccatctctaacgccaatcctgcctctatccagaagcacgaggacgagatcgtgagcgccgataacgacgattgggacatcgattacgtgggctccggaaaacggacagccgacggaagcgagttcgagtcaccgaaaaagaagcgaaaagttggtggtagtggtggaagcggcgaggccagcggttccggacgggctgacgcattggacgattttgatctggatatgctgggaagtgacgccctcgatgattttgaccttgacatgcttggttcggatgcccttgatgactttgacctcgacatgctcggcagtgacgcccttgatgatttcgacctggacatgctgattaactctagataaagggccctattctatagtgtcacctaaatgctagagctcgctgatcagcctcgactgtgccttctagttgccagccatctgttgtttgcccctcccccgtgccttccttgaccctggaaggtgccactcccactgtcctttcctaataaaatgaggaaattgcatcgcattgtctgagtaggtgtcattctattctggggggtggggtggggcaggacagcaagggggaggattgggaagacaatagcaggcatgctggggatgcggtgggctctatggcttctgaggcggaaagaaccagctggggctctagggggtatccccacgcgccctgtagcggcgcattaagcgcggcgggtgtggtggttacgcgcagcgtgaccgctacacttgccagcgccctagcgcccgctcctttcgctttcttcccttcctttctcgccacgttcgccggctttccccgtcaagctctaaatcggggcatccctttagggttccgatttagtgctttacggcacctcgaccccaaaaaacttgattagggtgatggttcacgtagtgggccatcgccctgatagacggtttttcgccctttgacgttggagtccacgttctttaatagtggactcttgttccaaactggaacaacactcaaccctatctcggtctattcttttgatttataagggattttggggatttcggcctattggttaaaaaatgagctgatttaacaaaaatttaacgcgaattaattctgtggaatgtgtgtcagttagggtgtggaaagtccccaggctccccaggcaggcagaagtatgcaaagcatgcatctcaattagtcagcaaccaggtgtggaaagtccccaggctccccagcaggcagaagtatgcaaagcatgcatctcaattagtcagcaaccatagtcccgcccctaactccgcccatcccgcccctaactccgcccagttccgcccattctccgccccatggctgactaattttttttatttatgcagaggccgaggccgcctctgcctctgagctattccagaagtagtgaggaggcttttttggaggcctaggcttttgcaaaaagctcccgggagcttgtatatccattttcggatctgatcaagagacaggatgaggatcgtttcgcatgattgaacaagatggattgcacgcaggttctccggccgcttgggtggagaggctattcggctatgactgggcacaacagacaatcggctgctctgatgccgccgtgttccggctgtcagcgcaggggcgcccggttctttttgtcaagaccgacctgtccggtgccctgaatgaactgcaggacgaggcagcgcggctatcgtggctggccacgacgggcgttccttgcgcagctgtgctcgacgttgtcactgaagcgggaagggactggctgctattgggcgaagtgccggggcaggatctcctgtcatctcaccttgctcctgccgagaaagtatccatcatggctgatgcaatgcggcggctgcatacgcttgatccggctacctgcccattcgaccaccaagcgaaacatcgcatcgagcgagcacgtactcggatggaagccggtcttgtcgatcaggatgatctggacgaagagcatcaggggctcgcgccagccgaactgttcgccaggctcaaggcgcgcatgcccgacggcgaggatctcgtcgtgacccatggcgatgcctgcttgccgaatatcatggtggaaaatggccgcttttctggattcatcgactgtggccggctgggtgtggcggaccgctatcaggacatagcgttggctacccgtgatattgctgaagagcttggcggcgaatgggctgaccgcttcctcgtgctttacggtatcgccgctcccgattcgcagcgcatcgccttctatcgccttcttgacgagttcttctgagcgggactctggggttcgaaatgaccgaccaagcgacgcccaacctgccatcacgagatttcgattccaccgccgccttctatgaaaggttgggcttcggaatcgttttccgggacgccggctggatgatcctccagcgcggggatctcatgctggagttcttcgcccaccccaacttgtttattgcagcttataatggttacaaataaagcaatagcatcacaaatttcacaaataaagcatttttttcactgcattctagttgtggtttgtccaaactcatcaatgtatcttatcatgtctgtataccgtcgacctctagctagagcttggcgtaatcatggtcatagctgtttcctgtgtgaaattgttatccgctcacaattccacacaacatacgagccggaagcataaagtgtaaagcctggggtgcctaatgagtgagctaactcacattaattgcgttgcgctcactgcccgctttccagtcgggaaacctgtcgtgccagctgcattaatgaatcggccaacgcgcggggagaggcggtttgcgtattgggcgctcttccgcttcctcgctcactgactcgctgcgctcggtcgttcggctgcggcgagcggtatcagctcactcaaaggcggtaatacggttatccacagaatcaggggataacgcaggaaagaacatgtgagcaaaaggccagcaaaaggccaggaaccgtaaaaaggccgcgttgctggcgtttttccataggctccgcccccctgacgagcatcacaaaaatcgacgctcaagtcagaggtggcgaaacccgacaggactataaagataccaggcgtttccccctggaagctccctcgtgcgctctcctgttccgaccctgccgcttaccggatacctgtccgcctttctcccttcgggaagcgtggcgctttctcaatgctcacgctgtaggtatctcagttcggtgtaggtcgttcgctccaagctgggctgtgtgcacgaaccccccgttcagcccgaccgctgcgccttatccggtaactatcgtcttgagtccaacccggtaagacacgacttatcgccactggcagcagccactggtaacaggattagcagagcgaggtatgtaggcggtgctacagagttcttgaagtggtggcctaactacggctacactagaaggacagtatttggtatctgcgctctgctgaagccagttaccttcggaaaaagagttggtagctcttgatccggcaaacaaaccaccgctggtagcggtggtttttttgtttgcaagcagcagattacgcgcagaaaaaaaggatctcaagaagatcctttgatcttttctacggggtctgacgctcagtggaacgaaaactcacgttaagggattttggtcatgagattatcaaaaaggatcttcacctagatccttttaaattaaaaatgaagttttaaatcaatctaaagtatatatgagtaaacttggtctgacagttaccaatgcttaatcagtgaggcacctatctcagcgatctgtctatttcgttcatccatagttgcctgactccccgtcgtgtagataactacgatacgggagggcttaccatctggccccagtgctgcaatgataccgcgagacccacgctcaccggctccagatttatcagcaataaaccagccagccggaagggccgagcgcagaagtggtcctgcaactttatccgcctccatccagtctattaattgttgccgggaagctagagtaagtagttcgccagttaatagtttgcgcaacgttgttgccattgctacaggcatcgtggtgtcacgctcgtcgtttggtatggcttcattcagctccggttcccaacgatcaaggcgagttacatgatcccccatgttgtgcaaaaaagcggttagctccttcggtcctccgatcgttgtcagaagtaagttggccgcagtgttatcactcatggttatggcagcactgcataattctcttactgtcatgccatccgtaagatgcttttctgtgactggtgagtactcaaccaagtcattctgagaatagtgtatgcggcgaccgagttgctcttgcccggcgtcaatacgggataataccgcgccacatagcagaactttaaaagtgctcatcattggaaaacgttcttcggggcgaaaactctcaaggatcttaccgctgttgagatccagttcgatgtaacccactcgtgcacccaactgatcttcagcatcttttactttcaccagcgtttctgggtgagcaaaaacaggaaggcaaaatgccgcaaaaaagggaataagggcgacacggaaatgttgaatactcatactcttcctttttcattattattgaagcatttatcagggttattgtctcatgagcggatacatatttgaatgtatttagaaaaataaacaaataggggttccgcgcacatttccccgaaaagtgccacctgacgtc

SEQ ID NO: 140 - DNA, 4930 bp, Artificial Sequence
  Synthetic
agcgcccaatacgcaaaccgcctctccccgcgcgttggccgattcattaatgcagctggcacgacaggtttcccgactggaaagcgggcagtgagcgcaacgcaattaatgtgagttagctcactcattaggcaccccaggctttacactttatgcttccggctcgtatgttgtgtggaattgtgagcggataacaatttcacacaggaaacagctatgaccatgattacgccaagctatttaggtgacactatagaatactcaagctatgcatcaagcttggtaccgagctcggatccactagtaacggccgccagtgtgctggaattcgccctttattaccgcctttgagtgagctgataccgctcgccgcagccgaacgaccgagcgcagcgagtcagtgagcgaggaagctcgaggcagtgaaaaaaatgctttatttgtgaaatttgtgatgctattgctttatttgtaaccattataagctgcaataaacaagttaacaacaacaattgcattcattttatgtttcaggttcagggggaggtgtgggaggttttttaaagcaagtaaaacctctacaaatgtggtatggctgattatgatcctctagagatatcgtcgacaagcttatcgatgcggccgcgctagcacgcgtcagctgactagaggatccccgggtaccgagctcgaattcttacttgtacagctcgtccatgccgtacaggaacaggtggtggcggccctcggagcgctcgtactgttccacgatggtgtagtcctcgttgtgggaggtgatgtccagcttggtgtccacgtagtagtagccgggcagttgcacgggcttcttggccatgtagatggtcttgaactccaccaggtagtggccgccgtccttcagcttcagggcctggtggatctcgcccttcagcacgccgtcgcgggggtacaggcgctcggtggaggcctcccagcccatggtcttcttctgcattacggggccgtcgggggggaagttggtgccgcgcatcttcaccttgtagatcagcgtgccgtcctgcagggaggagtcctgggtcacggtcaccagaccgccgtcctcgaagttcatcacgcgctcccacttgaagccctcggggaaggacagcttcttgtaatcggggatgtcggcggggtgcttcacgtacgccttggagccgtacatgaactggggggacaggatgtcccaggcgaagggcagggggccgcccttggtcaccttcagcttggcggtctgggtgccctcgtaggggcggccctcgccctcgccctcgatctcgaactcgtggccgttcatggagccctccatgcgcaccttgaagcgcatgaactctttgatgacctcctcgcccttgctcacggtggaacccagtccgccaccggaagttttatcgtcgtcatccttgtagtccatggtggcgaattctccaggcgatctgacggttcactaaacgagctctgcttatataggcctcccaccgtacacgcctacctcgcacctgagttttcttctgtacatgtgagtcaaccatctaaccatttggttaaatactagactatgccaccttatacttccaatttatgccatcttttagtacaaatatgtcaacttatacttcaaacaacaccaaatgaggaatttgggtggcagtgctcttccgcttcctcgctcactgactcgcttggtactattaccctgttatccctaaagggcgaattctgcagatatccatcacactggcggccgctcgagcatgcatctagagggcccaattcgccctatagtgagtcgtattacaattcactggccgtcgttttacaacgtcgtgactgggaaaaccctggcgttacccaacttaatcgccttgcagcacatccccctttcgccagctggcgtaatagcgaagaggcccgcaccgatcgcccttcccaacagttgcgcagcctatacgtacggcagtttaaggtttacacctataaaagagagagccgttatcgtctgtttgtggatgtacagagtgatattattgacacgccggggcgacggatggtgatccccctggccagtgcacgtctgctgtcagataaagtctcccgtgaactttacccggtggtgcatatcggggatgaaagctggcgcatgatgaccaccgatatggccagtgtgccggtctccgttatcggggaagaagtggctgatctcagccaccgcgaaaatgacatcaaaaacgccattaacctgatgttctggggaatataaatgtcaggcatgagattatcaaaaaggatcttcacctagatccttttcacgtagaaagccagtccgcagaaacggtgctgaccccggatgaatgtcagctactgggctatctggacaagggaaaacgcaagcgcaaagagaaagcaggtagcttgcagtgggcttacatggcgatagctagactgggcggttttatggacagcaagcgaaccggaattgccagctggggcgccctctggtaaggttgggaagccctgcaaagtaaactggatggctttctcgccgccaaggatctgatggcgcaggggatcaagctctgatcaagagacaggatgaggatcgtttcgcatgattgaacaagatggattgcacgcaggttctccggccgcttgggtggagaggctattcggctatgactgggcacaacagacaatcggctgctctgatgccgccgtgttccggctgtcagcgcaggggcgcccggttctttttgtcaagaccgacctgtccggtgccctgaatgaactgcaagacgaggcagcgcggctatcgtggctggccacgacgggcgttccttgcgcagctgtgctcgacgttgtcactgaagcgggaagggactggctgctattgggcgaagtgccggggcaggatctcctgtcatctcaccttgctcctgccgagaaagtatccatcatggctgatgcaatgcggcggctgcatacgcttgatccggctacctgcccattcgaccaccaagcgaaacatcgcatcgagcgagcacgtactcggatggaagccggtcttgtcgatcaggatgatctggacgaagagcatcaggggctcgcgccagccgaactgttcgccaggctcaaggcgagcatgcccgacggcgaggatctcgtcgtgacccatggcgatgcctgcttgccgaatatcatggtggaaaatggccgcttttctggattcatcgactgtggccggctgggtgtggcggaccgctatcaggacatagcgttggctacccgtgatattgctgaagagcttggcggcgaatgggctgaccgcttcctcgtgctttacggtatcgccgctcccgattcgcagcgcatcgccttctatcgccttcttgacgagttcttctgaattattaacgcttacaatttcctgatgcggtattttctccttacgcatctgtgcggtatttcacaccgcatacaggtggcacttttcggggaaatgtgcgcggaacccctatttgtttatttttctaaatacattcaaatatgtatccgctcatgagacaataaccctgataaatgcttcaataatagcacgtgaggagggccaccatggccaagttgaccagtgccgttccggtgctcaccgcgcgcgacgtcgccggagcggtcgagttctggaccgaccggctcgggttctcccgggacttcgtggaggacgacttcgccggtgtggtccgggacgacgtgaccctgttcatcagcgcggtccaggaccaggtggtgccggacaacaccctggcctgggtgtgggtgcgcggcctggacgagctgtacgccgagtggtcggaggtcgtgtccacgaacttccgggacgcctccgggccggccatgaccgagatcggcgagcagccgtgggggcgggagttcgccctgcgcgacccggccggcaactgcgtgcacttcgtggccgaggagcaggactgacacgtgctaaaacttcatttttaatttaaaaggatctaggtgaagatcctttttgataatctcatgaccaaaatcccttaacgtgagttttcgttccactgagcgtcagaccccgtagaaaagatcaaaggatcttcttgagatcctttttttctgcgcgtaatctgctgcttgcaaacaaaaaaaccaccgctaccagcggtggtttgtttgccggatcaagagctaccaactctttttccgaaggtaactggcttcagcagagcgcagataccaaatactgtccttctagtgtagccgtagttaggccaccacttcaagaactctgtagcaccgcctacatacctcgctctgctaatcctgttaccagtggctgctgccagtggcgataagtcgtgtcttaccgggttggactcaagacgatagttaccggataaggcgcagcggtcgggctgaacggggggttcgtgcacacagcccagcttggagcgaacgacctacaccgaactgagatacctacagcgtgagctatgagaaagcgccacgcttcccgaagggagaaaggcggacaggtatccggtaagcggcagggtcggaacaggagagcgcacgagggagcttccagggggaaacgcctggtatctttatagtcctgtcgggtttcgccacctctgacttgagcgtcgatttttgtgatgctcgtcaggggggcggagcctatggaaaaacgccagcaacgcggcctttttacggttcctgggcttttgctggccttttgctcacatgttctttcctgcgttatcccctgattctgtggataaccgtattaccgcctttgagtgagctgataccgctcgccgcagccgaacgaccgagcgcagcgagtcagtgagcgaggaagcggaag

SEQ ID NO: 141 - DNA, 4930 bp, Artificial Sequence
  Synthetic
agcgcccaatacgcaaaccgcctctccccgcgcgttggccgattcattaatgcagctggcacgacaggtttcccgactggaaagcgggcagtgagcgcaacgcaattaatgtgagttagctcactcattaggcaccccaggctttacactttatgcttccggctcgtatgttgtgtggaattgtgagcggataacaatttcacacaggaaacagctatgaccatgattacgccaagctatttaggtgacactatagaatactcaagctatgcatcaagcttggtaccgagctcggatccactagtaacggccgccagtgtgctggaattcgccctttattaccgcctttgagtgagctgataccgctcgccgcagccgaacgaccgagcgcagcgagtcagtgagcgaggaagctcgaggcagtgaaaaaaatgctttatttgtgaaatttgtgatgctattgctttatttgtaaccattataagctgcaataaacaagttaacaacaacaattgcattcattttatgtttcaggttcagggggaggtgtgggaggttttttaaagcaagtaaaacctctacaaatgtggtatggctgattatgatcctctagagatatcgtcgacaagcttatcgatgcggccgcgctagcacgcgtcagctgactagaggatccccgggtaccgagctcgaattcttacttgtacagctcgtccatgccgtacaggaacaggtggtggcggccctcggagcgctcgtactgttccacgatggtgtagtcctcgttgtgggaggtgatgtccagcttggtgtccacgtagtagtagccgggcagttgcacgggcttcttggccatgtagatggtcttgaactccaccaggtagtggccgccgtccttcagcttcagggcctggtggatctcgcccttcagcacgccgtcgcgggggtacaggcgctcggtggaggcctcccagcccatggtcttcttctgcattacggggccgtcgggggggaagttggtgccgcgcatcttcaccttgtagatcagcgtgccgtcctgcagggaggagtcctgggtcacggtcaccagaccgccgtcctcgaagttcatcacgcgctcccacttgaagccctcggggaaggacagcttcttgtaatcggggatgtcggcggggtgcttcacgtacgccttggagccgtacatgaactggggggacaggatgtcccaggcgaagggcagggggccgcccttggtcaccttcagcttggcggtctgggtgccctcgtaggggcggccctcgccctcgccctcgatctcgaactcgtggccgttcatggagccctccatgcgcaccttgaagcgcatgaactctttgatgacctcctcgcccttgctcacggtggaacccagtccgccaccggaagttttatcgtcgtcatccttgtagtccatggtggcgaattctccaggcgatctgacggttcactaaacgagctctgcttatataggcctcccaccgtacacgcctacctcgcaccctttcggcggtacatagtagaccagcctgtttgttgttaaactacaacaaaaatagcttatgcacgcttattgtaccaattatgcagggtatcaaggaagatatgcaggcttatggtgcaaactacaaagcttcagatgggtggaagccccagctcttccgcttcctcgctcactgactcgcttggtactattaccctgttatccctaaagggcgaattctgcagatatccatcacactggcggccgctcgagcatgcatctagagggcccaattcgccctatagtgagtcgtattacaattcactggccgtcgttttacaacgtcgtgactgggaaaaccctggcgttacccaacttaatcgccttgcagcacatccccctttcgccagctggcgtaatagcgaagaggcccgcaccgatcgcccttcccaacagttgcgcagcctatacgtacggcagtttaaggtttacacctataaaagagagagccgttatcgtctgtttgtggatgtacagagtgatattattgacacgccggggcgacggatggtgatccccctggccagtgcacgtctgctgtcagataaagtctcccgtgaactttacccggtggtgcatatcggggatgaaagctggcgcatgatgaccaccgatatggccagtgtgccggtctccgttatcggggaagaagtggctgatctcagccaccgcgaaaatgacatcaaaaacgccattaacctgatgttctggggaatataaatgtcaggcatgagattatcaaaaaggatcttcacctagatccttttcacgtagaaagccagtccgcagaaacggtgctgaccccggatgaatgtcagctactgggctatctggacaagggaaaacgcaagcgcaaagagaaagcaggtagcttgcagtgggcttacatggcgatagctagactgggcggttttatggacagcaagcgaaccggaattgccagctggggcgccctctggtaaggttgggaagccctgcaaagtaaactggatggctttctcgccgccaaggatctgatggcgcaggggatcaagctctgatcaagagacaggatgaggatcgtttcgcatgattgaacaagatggattgcacgcaggttctccggccgcttgggtggagaggctattcggctatgactgggcacaacagacaatcggctgctctgatgccgccgtgttccggctgtcagcgcaggggcgcccggttctttttgtcaagaccgacctgtccggtgccctgaatgaactgcaagacgaggcagcgcggctatcgtggctggccacgacgggcgttccttgcgcagctgtgctcgacgttgtcactgaagcgggaagggactggctgctattgggcgaagtgccggggcaggatctcctgtcatctcaccttgctcctgccgagaaagtatccatcatggctgatgcaatgcggcggctgcatacgcttgatccggctacctgcccattcgaccaccaagcgaaacatcgcatcgagcgagcacgtactcggatggaagccggtcttgtcgatcaggatgatctggacgaagagcatcaggggctcgcgccagccgaactgttcgccaggctcaaggcgagcatgcccgacggcgaggatctcgtcgtgacccatggcgatgcctgcttgccgaatatcatggtggaaaatggccgcttttctggattcatcgactgtggccggctgggtgtggcggaccgctatcaggacatagcgttggctacccgtgatattgctgaagagcttggcggcgaatgggctgaccgcttcctcgtgctttacggtatcgccgctcccgattcgcagcgcatcgccttctatcgccttcttgacgagttcttctgaattattaacgcttacaatttcctgatgcggtattttctccttacgcatctgtgcggtatttcacaccgcatacaggtggcacttttcggggaaatgtgcgcggaacccctatttgtttatttttctaaatacattcaaatatgtatccgctcatgagacaataaccctgataaatgcttcaataatagcacgtgaggagggccaccatggccaagttgaccagtgccgttccggtgctcaccgcgcgcgacgtcgccggagcggtcgagttctggaccgaccggctcgggttctcccgggacttcgtggaggacgacttcgccggtgtggtccgggacgacgtgaccctgttcatcagcgcggtccaggaccaggtggtgccggacaacaccctggcctgggtgtgggtgcgcggcctggacgagctgtacgccgagtggtcggaggtcgtgtccacgaacttccgggacgcctccgggccggccatgaccgagatcggcgagcagccgtgggggcgggagttcgccctgcgcgacccggccggcaactgcgtgcacttcgtggccgaggagcaggactgacacgtgctaaaacttcatttttaatttaaaaggatctaggtgaagatcctttttgataatctcatgaccaaaatcccttaacgtgagttttcgttccactgagcgtcagaccccgtagaaaagatcaaaggatcttcttgagatcctttttttctgcgcgtaatctgctgcttgcaaacaaaaaaaccaccgctaccagcggtggtttgtttgccggatcaagagctaccaactctttttccgaaggtaactggcttcagcagagcgcagataccaaatactgtccttctagtgtagccgtagttaggccaccacttcaagaactctgtagcaccgcctacatacctcgctctgctaatcctgttaccagtggctgctgccagtggcgataagtcgtgtcttaccgggttggactcaagacgatagttaccggataaggcgcagcggtcgggctgaacggggggttcgtgcacacagcccagcttggagcgaacgacctacaccgaactgagatacctacagcgtgagctatgagaaagcgccacgcttcccgaagggagaaaggcggacaggtatccggtaagcggcagggtcggaacaggagagcgcacgagggagcttccagggggaaacgcctggtatctttatagtcctgtcgggtttcgccacctctgacttgagcgtcgatttttgtgatgctcgtcaggggggcggagcctatggaaaaacgccagcaacgcggcctttttacggttcctgggcttttgctggccttttgctcacatgttctttcctgcgttatcccctgattctgtggataaccgtattaccgcctttgagtgagctgataccgctcgccgcagccgaacgaccgagcgcagcgagtcagtgagcgaggaagcggaag

SEQ ID NO: 142 - DNA, 4930 bp, Artificial Sequence
  Synthetic
agcgcccaatacgcaaaccgcctctccccgcgcgttggccgattcattaatgcagctggcacgacaggtttcccgactggaaagcgggcagtgagcgcaacgcaattaatgtgagttagctcactcattaggcaccccaggctttacactttatgcttccggctcgtatgttgtgtggaattgtgagcggataacaatttcacacaggaaacagctatgaccatgattacgccaagctatttaggtgacactatagaatactcaagctatgcatcaagcttggtaccgagctcggatccactagtaacggccgccagtgtgctggaattcgccctttattaccgcctttgagtgagctgataccgctcgccgcagccgaacgaccgagcgcagcgagtcagtgagcgaggaagctcgaggcagtgaaaaaaatgctttatttgtgaaatttgtgatgctattgctttatttgtaaccattataagctgcaataaacaagttaacaacaacaattgcattcattttatgtttcaggttcagggggaggtgtgggaggttttttaaagcaagtaaaacctctacaaatgtggtatggctgattatgatcctctagagatatcgtcgacaagcttatcgatgcggccgcgctagcacgcgtcagctgactagaggatccccgggtaccgagctcgaattcttacttgtacagctcgtccatgccgtacaggaacaggtggtggcggccctcggagcgctcgtactgttccacgatggtgtagtcctcgttgtgggaggtgatgtccagcttggtgtccacgtagtagtagccgggcagttgcacgggcttcttggccatgtagatggtcttgaactccaccaggtagtggccgccgtccttcagcttcagggcctggtggatctcgcccttcagcacgccgtcgcgggggtacaggcgctcggtggaggcctcccagcccatggtcttcttctgcattacggggccgtcgggggggaagttggtgccgcgcatcttcaccttgtagatcagcgtgccgtcctgcagggaggagtcctgggtcacggtcaccagaccgccgtcctcgaagttcatcacgcgctcccacttgaagccctcggggaaggacagcttcttgtaatcggggatgtcggcggggtgcttcacgtacgccttggagccgtacatgaactggggggacaggatgtcccaggcgaagggcagggggccgcccttggtcaccttcagcttggcggtctgggtgccctcgtaggggcggccctcgccctcgccctcgatctcgaactcgtggccgttcatggagccctccatgcgcaccttgaagcgcatgaactctttgatgacctcctcgcccttgctcacggtggaacccagtccgccaccggaagttttatcgtcgtcatccttgtagtccatggtggcgaattctccaggcgatctgacggttcactaaacgagctctgcttatataggcctcccaccgtacacgcctacctcgcaccctcaagtaattgattttaataatattaaattatgtagctaaaatacaaaaatgctattttatgtcaaactatgctttaaatttgtcagactatggttgtcttatgtcaatgtatgctttcagcgacatgaaaaataaagctatagctaaaaagctcttccgcttcctcgctcactgactcgcttggtactattaccctgttatccctaaagggcgaattctgcagatatccatcacactggcggccgctcgagcatgcatctagagggcccaattcgccctatagtgagtcgtattacaattcactggccgtcgttttacaacgtcgtgactgggaaaaccctggcgttacccaacttaatcgccttgcagcacatccccctttcgccagctggcgtaatagcgaagaggcccgcaccgatcgcccttcccaacagttgcgcagcctatacgtacggcagtttaaggtttacacctataaaagagagagccgttatcgtctgtttgtggatgtacagagtgatattattgacacgccggggcgacggatggtgatccccctggccagtgcacgtctgctgtcagataaagtctcccgtgaactttacccggtggtgcatatcggggatgaaagctggcgcatgatgaccaccgatatggccagtgtgccggtctccgttatcggggaagaagtggctgatctcagccaccgcgaaaatgacatcaaaaacgccattaacctgatgttctggggaatataaatgtcaggcatgagattatcaaaaaggatcttcacctagatccttttcacgtagaaagccagtccgcagaaacggtgctgaccccggatgaatgtcagctactgggctatctggacaagggaaaacgcaagcgcaaagagaaagcaggtagcttgcagtgggcttacatggcgatagctagactgggcggttttatggacagcaagcgaaccggaattgccagctggggcgccctctggtaaggttgggaagccctgcaaagtaaactggatggctttctcgccgccaaggatctgatggcgcaggggatcaagctctgatcaagagacaggatgaggatcgtttcgcatgattgaacaagatggattgcacgcaggttctccggccgcttgggtggagaggctattcggctatgactgggcacaacagacaatcggctgctctgatgccgccgtgttccggctgtcagcgcaggggcgcccggttctttttgtcaagaccgacctgtccggtgccctgaatgaactgcaagacgaggcagcgcggctatcgtggctggccacgacgggcgttccttgcgcagctgtgctcgacgttgtcactgaagcgggaagggactggctgctattgggcgaagtgccggggcaggatctcctgtcatctcaccttgctcctgccgagaaagtatccatcatggctgatgcaatgcggcggctgcatacgcttgatccggctacctgcccattcgaccaccaagcgaaacatcgcatcgagcgagcacgtactcggatggaagccggtcttgtcgatcaggatgatctggacgaagagcatcaggggctcgcgccagccgaactgttcgccaggctcaaggcgagcatgcccgacggcgaggatctcgtcgtgacccatggcgatgcctgcttgccgaatatcatggtggaaaatggccgcttttctggattcatcgactgtggccggctgggtgtggcggaccgctatcaggacatagcgttggctacccgtgatattgctgaagagcttggcggcgaatgggctgaccgcttcctcgtgctttacggtatcgccgctcccgattcgcagcgcatcgccttctatcgccttcttgacgagttcttctgaattattaacgcttacaatttcctgatgcggtattttctccttacgcatctgtgcggtatttcacaccgcatacaggtggcacttttcggggaaatgtgcgcggaacccctatttgtttatttttctaaatacattcaaatatgtatccgctcatgagacaataaccctgataaatgcttcaataatagcacgtgaggagggccaccatggccaagttgaccagtgccgttccggtgctcaccgcgcgcgacgtcgccggagcggtcgagttctggaccgaccggctcgggttctcccgggacttcgtggaggacgacttcgccggtgtggtccgggacgacgtgaccctgttcatcagcgcggtccaggaccaggtggtgccggacaacaccctggcctgggtgtgggtgcgcggcctggacgagctgtacgccgagtggtcggaggtcgtgtccacgaacttccgggacgcctccgggccggccatgaccgagatcggcgagcagccgtgggggcgggagttcgccctgcgcgacccggccggcaactgcgtgcacttcgtggccgaggagcaggactgacacgtgctaaaacttcatttttaatttaaaaggatctaggtgaagatcctttttgataatctcatgaccaaaatcccttaacgtgagttttcgttccactgagcgtcagaccccgtagaaaagatcaaaggatcttcttgagatcctttttttctgcgcgtaatctgctgcttgcaaacaaaaaaaccaccgctaccagcggtggtttgtttgccggatcaagagctaccaactctttttccgaaggtaactggcttcagcagagcgcagataccaaatactgtccttctagtgtagccgtagttaggccaccacttcaagaactctgtagcaccgcctacatacctcgctctgctaatcctgttaccagtggctgctgccagtggcgataagtcgtgtcttaccgggttggactcaagacgatagttaccggataaggcgcagcggtcgggctgaacggggggttcgtgcacacagcccagcttggagcgaacgacctacaccgaactgagatacctacagcgtgagctatgagaaagcgccacgcttcccgaagggagaaaggcggacaggtatccggtaagcggcagggtcggaacaggagagcgcacgagggagcttccagggggaaacgcctggtatctttatagtcctgtcgggtttcgccacctctgacttgagcgtcgatttttgtgatgctcgtcaggggggcggagcctatggaaaaacgccagcaacgcggcctttttacggttcctgggcttttgctggccttttgctcacatgttctttcctgcgttatcccctgattctgtggataaccgtattaccgcctttgagtgagctgataccgctcgccgcagccgaacgaccgagcgcagcgagtcagtgagcgaggaagcggaag

SEQ ID NO: 143 - DNA, 4930 bp, Artificial Sequence
  Synthetic
agcgcccaatacgcaaaccgcctctccccgcgcgttggccgattcattaatgcagctggcacgacaggtttcccgactggaaagcgggcagtgagcgcaacgcaattaatgtgagttagctcactcattaggcaccccaggctttacactttatgcttccggctcgtatgttgtgtggaattgtgagcggataacaatttcacacaggaaacagctatgaccatgattacgccaagctatttaggtgacactatagaatactcaagctatgcatcaagcttggtaccgagctcggatccactagtaacggccgccagtgtgctggaattcgccctttattaccgcctttgagtgagctgataccgctcgccgcagccgaacgaccgagcgcagcgagtcagtgagcgaggaagctcgaggcagtgaaaaaaatgctttatttgtgaaatttgtgatgctattgctttatttgtaaccattataagctgcaataaacaagttaacaacaacaattgcattcattttatgtttcaggttcagggggaggtgtgggaggttttttaaagcaagtaaaacctctacaaatgtggtatggctgattatgatcctctagagatatcgtcgacaagcttatcgatgcggccgcgctagcacgcgtcagctgactagaggatccccgggtaccgagctcgaattcttacttgtacagctcgtccatgccgtacaggaacaggtggtggcggccctcggagcgctcgtactgttccacgatggtgtagtcctcgttgtgggaggtgatgtccagcttggtgtccacgtagtagtagccgggcagttgcacgggcttcttggccatgtagatggtcttgaactccaccaggtagtggccgccgtccttcagcttcagggcctggtggatctcgcccttcagcacgccgtcgcgggggtacaggcgctcggtggaggcctcccagcccatggtcttcttctgcattacggggccgtcgggggggaagttggtgccgcgcatcttcaccttgtagatcagcgtgccgtcctgcagggaggagtcctgggtcacggtcaccagaccgccgtcctcgaagttcatcacgcgctcccacttgaagccctcggggaaggacagcttcttgtaatcggggatgtcggcggggtgcttcacgtacgccttggagccgtacatgaactggggggacaggatgtcccaggcgaagggcagggggccgcccttggtcaccttcagcttggcggtctgggtgccctcgtaggggcggccctcgccctcgccctcgatctcgaactcgtggccgttcatggagccctccatgcgcaccttgaagcgcatgaactctttgatgacctcctcgcccttgctcacggtggaacccagtccgccaccggaagttttatcgtcgtcatccttgtagtccatggtggcgaattctccaggcgatctgacggttcactaaacgagctctgcttatataggcctcccaccgtacacgcctacctcgcaccttagtttggtcaaacatagctaagtcacttttgttgtaaacctacaacaaaacgtagtctatgcagacttatagtgcaaatttgcgaaatattctgcaatttatgcgaacttattttgcaaacatcagatgggcggaggccccagccacatcgctcttccgcttcctcgctcactgactcgcttggtactattaccctgttatccctaaagggcgaattctgcagatatccatcacactggcggccgctcgagcatgcatctagagggcccaattcgccctatagtgagtcgtattacaattcactggccgtcgttttacaacgtcgtgactgggaaaaccctggcgttacccaacttaatcgccttgcagcacatccccctttcgccagctggcgtaatagcgaagaggcccgcaccgatcgcccttcccaacagttgcgcagcctatacgtacggcagtttaaggtttacacctataaaagagagagccgttatcgtctgtttgtggatgtacagagtgatattattgacacgccggggcgacggatggtgatccccctggccagtgcacgtctgctgtcagataaagtctcccgtgaactttacccggtggtgcatatcggggatgaaagctggcgcatgatgaccaccgatatggccagtgtgccggtctccgttatcggggaagaagtggctgatctcagccaccgcgaaaatgacatcaaaaacgccattaacctgatgttctggggaatataaatgtcaggcatgagattatcaaaaaggatcttcacctagatccttttcacgtagaaagccagtccgcagaaacggtgctgaccccggatgaatgtcagctactgggctatctggacaagggaaaacgcaagcgcaaagagaaagcaggtagcttgcagtgggcttacatggcgatagctagactgggcggttttatggacagcaagcgaaccggaattgccagctggggcgccctctggtaaggttgggaagccctgcaaagtaaactggatggctttctcgccgccaaggatctgatggcgcaggggatcaagctctgatcaagagacaggatgaggatcgtttcgcatgattgaacaagatggattgcacgcaggttctccggccgcttgggtggagaggctattcggctatgactgggcacaacagacaatcggctgctctgatgccgccgtgttccggctgtcagcgcaggggcgcccggttctttttgtcaagaccgacctgtccggtgccctgaatgaactgcaagacgaggcagcgcggctatcgtggctggccacgacgggcgttccttgcgcagctgtgctcgacgttgtcactgaagcgggaagggactggctgctattgggcgaagtgccggggcaggatctcctgtcatctcaccttgctcctgccgagaaagtatccatcatggctgatgcaatgcggcggctgcatacgcttgatccggctacctgcccattcgaccaccaagcgaaacatcgcatcgagcgagcacgtactcggatggaagccggtcttgtcgatcaggatgatctggacgaagagcatcaggggctcgcgccagccgaactgttcgccaggctcaaggcgagcatgcccgacggcgaggatctcgtcgtgacccatggcgatgcctgcttgccgaatatcatggtggaaaatggccgcttttctggattcatcgactgtggccggctgggtgtggcggaccgctatcaggacatagcgttggctacccgtgatattgctgaagagcttggcggcgaatgggctgaccgcttcctcgtgctttacggtatcgccgctcccgattcgcagcgcatcgccttctatcgccttcttgacgagttcttctgaattattaacgcttacaatttcctgatgcggtattttctccttacgcatctgtgcggtatttcacaccgcatacaggtggcacttttcggggaaatgtgcgcggaacccctatttgtttatttttctaaatacattcaaatatgtatccgctcatgagacaataaccctgataaatgcttcaataatagcacgtgaggagggccaccatggccaagttgaccagtgccgttccggtgctcaccgcgcgcgacgtcgccggagcggtcgagttctggaccgaccggctcgggttctcccgggacttcgtggaggacgacttcgccggtgtggtccgggacgacgtgaccctgttcatcagcgcggtccaggaccaggtggtgccggacaacaccctggcctgggtgtgggtgcgcggcctggacgagctgtacgccgagtggtcggaggtcgtgtccacgaacttccgggacgcctccgggccggccatgaccgagatcggcgagcagccgtgggggcgggagttcgccctgcgcgacccggccggcaactgcgtgcacttcgtggccgaggagcaggactgacacgtgctaaaacttcatttttaatttaaaaggatctaggtgaagatcctttttgataatctcatgaccaaaatcccttaacgtgagttttcgttccactgagcgtcagaccccgtagaaaagatcaaaggatcttcttgagatcctttttttctgcgcgtaatctgctgcttgcaaacaaaaaaaccaccgctaccagcggtggtttgtttgccggatcaagagctaccaactctttttccgaaggtaactggcttcagcagagcgcagataccaaatactgtccttctagtgtagccgtagttaggccaccacttcaagaactctgtagcaccgcctacatacctcgctctgctaatcctgttaccagtggctgctgccagtggcgataagtcgtgtcttaccgggttggactcaagacgatagttaccggataaggcgcagcggtcgggctgaacggggggttcgtgcacacagcccagcttggagcgaacgacctacaccgaactgagatacctacagcgtgagctatgagaaagcgccacgcttcccgaagggagaaaggcggacaggtatccggtaagcggcagggtcggaacaggagagcgcacgagggagcttccagggggaaacgcctggtatctttatagtcctgtcgggtttcgccacctctgacttgagcgtcgatttttgtgatgctcgtcaggggggcggagcctatggaaaaacgccagcaacgcggcctttttacggttcctgggcttttgctggccttttgctcacatgttctttcctgcgttatcccctgattctgtggataaccgtattaccgcctttgagtgagctgataccgctcgccgcagccgaacgaccgagcgcagcgagtcagtgagcgaggaagcggaag

SEQ ID NO: 144 - DNA, 4930 bp, Artificial Sequence
  Synthetic
agcgcccaatacgcaaaccgcctctccccgcgcgttggccgattcattaatgcagctggcacgacaggtttcccgactggaaagcgggcagtgagcgcaacgcaattaatgtgagttagctcactcattaggcaccccaggctttacactttatgcttccggctcgtatgttgtgtggaattgtgagcggataacaatttcacacaggaaacagctatgaccatgattacgccaagctatttaggtgacactatagaatactcaagctatgcatcaagcttggtaccgagctcggatccactagtaacggccgccagtgtgctggaattcgccctttattaccgcctttgagtgagctgataccgctcgccgcagccgaacgaccgagcgcagcgagtcagtgagcgaggaagctcgaggcagtgaaaaaaatgctttatttgtgaaatttgtgatgctattgctttatttgtaaccattataagctgcaataaacaagttaacaacaacaattgcattcattttatgtttcaggttcagggggaggtgtgggaggttttttaaagcaagtaaaacctctacaaatgtggtatggctgattatgatcctctagagatatcgtcgacaagcttatcgatgcggccgcgctagcacgcgtcagctgactagaggatccccgggtaccgagctcgaattcttacttgtacagctcgtccatgccgtacaggaacaggtggtggcggccctcggagcgctcgtactgttccacgatggtgtagtcctcgttgtgggaggtgatgtccagcttggtgtccacgtagtagtagccgggcagttgcacgggcttcttggccatgtagatggtcttgaactccaccaggtagtggccgccgtccttcagcttcagggcctggtggatctcgcccttcagcacgccgtcgcgggggtacaggcgctcggtggaggcctcccagcccatggtcttcttctgcattacggggccgtcgggggggaagttggtgccgcgcatcttcaccttgtagatcagcgtgccgtcctgcagggaggagtcctgggtcacggtcaccagaccgccgtcctcgaagttcatcacgcgctcccacttgaagccctcggggaaggacagcttcttgtaatcggggatgtcggcggggtgcttcacgtacgccttggagccgtacatgaactggggggacaggatgtcccaggcgaagggcagggggccgcccttggtcaccttcagcttggcggtctgggtgccctcgtaggggcggccctcgccctcgccctcgatctcgaactcgtggccgttcatggagccctccatgcgcaccttgaagcgcatgaactctttgatgacctcctcgcccttgctcacggtggaacccagtccgccaccggaagttttatcgtcgtcatccttgtagtccatggtggcgaattctccaggcgatctgacggttcactaaacgagctctgcttatataggcctcccaccgtacacgcctacctcgcaccttggtttggtcgtacatagcaaaagcacttttgttgtaaacctacaacaaaaaatagaccatgaagacttagggtgcaaataagaaaagaagcctgcaatttatgcgaacatatattgcaggcttcataaggggtgggaacccagccacatcgctcttccgcttcctcgctcactgactcgcttggtactattaccctgttatccctaaagggcgaattctgcagatatccatcacactggcggccgctcgagcatgcatctagagggcccaattcgccctatagtgagtcgtattacaattcactggccgtcgttttacaacgtcgtgactgggaaaaccctggcgttacccaacttaatcgccttgcagcacatccccctttcgccagctggcgtaatagcgaagaggcccgcaccgatcgcccttcccaacagttgcgcagcctatacgtacggcagtttaaggtttacacctataaaagagagagccgttatcgtctgtttgtggatgtacagagtgatattattgacacgccggggcgacggatggtgatccccctggccagtgcacgtctgctgtcagataaagtctcccgtgaactttacccggtggtgcatatcggggatgaaagctggcgcatgatgaccaccgatatggccagtgtgccggtctccgttatcggggaagaagtggctgatctcagccaccgcgaaaatgacatcaaaaacgccattaacctgatgttctggggaatataaatgtcaggcatgagattatcaaaaaggatcttcacctagatccttttcacgtagaaagccagtccgcagaaacggtgctgaccccggatgaatgtcagctactgggctatctggacaagggaaaacgcaagcgcaaagagaaagcaggtagcttgcagtgggcttacatggcgatagctagactgggcggttttatggacagcaagcgaaccggaattgccagctggggcgccctctggtaaggttgggaagccctgcaaagtaaactggatggctttctcgccgccaaggatctgatggcgcaggggatcaagctctgatcaagagacaggatgaggatcgtttcgcatgattgaacaagatggattgcacgcaggttctccggccgcttgggtggagaggctattcggctatgactgggcacaacagacaatcggctgctctgatgccgccgtgttccggctgtcagcgcaggggcgcccggttctttttgtcaagaccgacctgtccggtgccctgaatgaactgcaagacgaggcagcgcggctatcgtggctggccacgacgggcgttccttgcgcagctgtgctcgacgttgtcactgaagcgggaagggactggctgctattgggcgaagtgccggggcaggatctcctgtcatctcaccttgctcctgccgagaaagtatccatcatggctgatgcaatgcggcggctgcatacgcttgatccggctacctgcccattcgaccaccaagcgaaacatcgcatcgagcgagcacgtactcggatggaagccggtcttgtcgatcaggatgatctggacgaagagcatcaggggctcgcgccagccgaactgttcgccaggctcaaggcgagcatgcccgacggcgaggatctcgtcgtgacccatggcgatgcctgcttgccgaatatcatggtggaaaatggccgcttttctggattcatcgactgtggccggctgggtgtggcggaccgctatcaggacatagcgttggctacccgtgatattgctgaagagcttggcggcgaatgggctgaccgcttcctcgtgctttacggtatcgccgctcccgattcgcagcgcatcgccttctatcgccttcttgacgagttcttctgaattattaacgcttacaatttcctgatgcggtattttctccttacgcatctgtgcggtatttcacaccgcatacaggtggcacttttcggggaaatgtgcgcggaacccctatttgtttatttttctaaatacattcaaatatgtatccgctcatgagacaataaccctgataaatgcttcaataatagcacgtgaggagggccaccatggccaagttgaccagtgccgttccggtgctcaccgcgcgcgacgtcgccggagcggtcgagttctggaccgaccggctcgggttctcccgggacttcgtggaggacgacttcgccggtgtggtccgggacgacgtgaccctgttcatcagcgcggtccaggaccaggtggtgccggacaacaccctggcctgggtgtgggtgcgcggcctggacgagctgtacgccgagtggtcggaggtcgtgtccacgaacttccgggacgcctccgggccggccatgaccgagatcggcgagcagccgtgggggcgggagttcgccctgcgcgacccggccggcaactgcgtgcacttcgtggccgaggagcaggactgacacgtgctaaaacttcatttttaatttaaaaggatctaggtgaagatcctttttgataatctcatgaccaaaatcccttaacgtgagttttcgttccactgagcgtcagaccccgtagaaaagatcaaaggatcttcttgagatcctttttttctgcgcgtaatctgctgcttgcaaacaaaaaaaccaccgctaccagcggtggtttgtttgccggatcaagagctaccaactctttttccgaaggtaactggcttcagcagagcgcagataccaaatactgtccttctagtgtagccgtagttaggccaccacttcaagaactctgtagcaccgcctacatacctcgctctgctaatcctgttaccagtggctgctgccagtggcgataagtcgtgtcttaccgggttggactcaagacgatagttaccggataaggcgcagcggtcgggctgaacggggggttcgtgcacacagcccagcttggagcgaacgacctacaccgaactgagatacctacagcgtgagctatgagaaagcgccacgcttcccgaagggagaaaggcggacaggtatccggtaagcggcagggtcggaacaggagagcgcacgagggagcttccagggggaaacgcctggtatctttatagtcctgtcgggtttcgccacctctgacttgagcgtcgatttttgtgatgctcgtcaggggggcggagcctatggaaaaacgccagcaacgcggcctttttacggttcctgggcttttgctggccttttgctcacatgttctttcctgcgttatcccctgattctgtggataaccgtattaccgcctttgagtgagctgataccgctcgccgcagccgaacgaccgagcgcagcgagtcagtgagcgaggaagcggaag

SEQ ID NO: 145 - DNA, 4930 bp, Artificial Sequence
  Synthetic
agcgcccaatacgcaaaccgcctctccccgcgcgttggccgattcattaatgcagctggcacgacaggtttcccgactggaaagcgggcagtgagcgcaacgcaattaatgtgagttagctcactcattaggcaccccaggctttacactttatgcttccggctcgtatgttgtgtggaattgtgagcggataacaatttcacacaggaaacagctatgaccatgattacgccaagctatttaggtgacactatagaatactcaagctatgcatcaagcttggtaccgagctcggatccactagtaacggccgccagtgtgctggaattcgccctttattaccgcctttgagtgagctgataccgctcgccgcagccgaacgaccgagcgcagcgagtcagtgagcgaggaagctcgaggcagtgaaaaaaatgctttatttgtgaaatttgtgatgctattgctttatttgtaaccattataagctgcaataaacaagttaacaacaacaattgcattcattttatgtttcaggttcagggggaggtgtgggaggttttttaaagcaagtaaaacctctacaaatgtggtatggctgattatgatcctctagagatatcgtcgacaagcttatcgatgcggccgcgctagcacgcgtcagctgactagaggatccccgggtaccgagctcgaattcttacttgtacagctcgtccatgccgtacaggaacaggtggtggcggccctcggagcgctcgtactgttccacgatggtgtagtcctcgttgtgggaggtgatgtccagcttggtgtccacgtagtagtagccgggcagttgcacgggcttcttggccatgtagatggtcttgaactccaccaggtagtggccgccgtccttcagcttcagggcctggtggatctcgcccttcagcacgccgtcgcgggggtacaggcgctcggtggaggcctcccagcccatggtcttcttctgcattacggggccgtcgggggggaagttggtgccgcgcatcttcaccttgtagatcagcgtgccgtcctgcagggaggagtcctgggtcacggtcaccagaccgccgtcctcgaagttcatcacgcgctcccacttgaagccctcggggaaggacagcttcttgtaatcggggatgtcggcggggtgcttcacgtacgccttggagccgtacatgaactggggggacaggatgtcccaggcgaagggcagggggccgcccttggtcaccttcagcttggcggtctgggtgccctcgtaggggcggccctcgccctcgccctcgatctcgaactcgtggccgttcatggagccctccatgcgcaccttgaagcgcatgaactctttgatgacctcctcgcccttgctcacggtggaacccagtccgccaccggaagttttatcgtcgtcatccttgtagtccatggtggcgaattctccaggcgatctgacggttcactaaacgagctctgcttatataggcctcccaccgtacacgcctacctcgcacctcttaaataattgattataatggaatttatttttagcatcatttttaataaggggctttatgtcagagtatgactttaattatgtcaaggtatggttgcattatgtcaaactatggttgcagcgacactagatccttaaagccgatcaacacgctcttccgcttcctcgctcactgactcgcttggtactattaccctgttatccctaaagggcgaattctgcagatatccatcacactggcggccgctcgagcatgcatctagagggcccaattcgccctatagtgagtcgtattacaattcactggccgtcgttttacaacgtcgtgactgggaaaaccctggcgttacccaacttaatcgccttgcagcacatccccctttcgccagctggcgtaatagcgaagaggcccgcaccgatcgcccttcccaacagttgcgcagcctatacgtacggcagtttaaggtttacacctataaaagagagagccgttatcgtctgtttgtggatgtacagagtgatattattgacacgccggggcgacggatggtgatccccctggccagtgcacgtctgctgtcagataaagtctcccgtgaactttacccggtggtgcatatcggggatgaaagctggcgcatgatgaccaccgatatggccagtgtgccggtctccgttatcggggaagaagtggctgatctcagccaccgcgaaaatgacatcaaaaacgccattaacctgatgttctggggaatataaatgtcaggcatgagattatcaaaaaggatcttcacctagatccttttcacgtagaaagccagtccgcagaaacggtgctgaccccggatgaatgtcagctactgggctatctggacaagggaaaacgcaagcgcaaagagaaagcaggtagcttgcagtgggcttacatggcgatagctagactgggcggttttatggacagcaagcgaaccggaattgccagctggggcgccctctggtaaggttgggaagccctgcaaagtaaactggatggctttctcgccgccaaggatctgatggcgcaggggatcaagctctgatcaagagacaggatgaggatcgtttcgcatgattgaacaagatggattgcacgcaggttctccggccgcttgggtggagaggctattcggctatgactgggcacaacagacaatcggctgctctgatgccgccgtgttccggctgtcagcgcaggggcgcccggttctttttgtcaagaccgacctgtccggtgccctgaatgaactgcaagacgaggcagcgcggctatcgtggctggccacgacgggcgttccttgcgcagctgtgctcgacgttgtcactgaagcgggaagggactggctgctattgggcgaagtgccggggcaggatctcctgtcatctcaccttgctcctgccgagaaagtatccatcatggctgatgcaatgcggcggctgcatacgcttgatccggctacctgcccattcgaccaccaagcgaaacatcgcatcgagcgagcacgtactcggatggaagccggtcttgtcgatcaggatgatctggacgaagagcatcaggggctcgcgccagccgaactgttcgccaggctcaaggcgagcatgcccgacggcgaggatctcgtcgtgacccatggcgatgcctgcttgccgaatatcatggtggaaaatggccgcttttctggattcatcgactgtggccggctgggtgtggcggaccgctatcaggacatagcgttggctacccgtgatattgctgaagagcttggcggcgaatgggctgaccgcttcctcgtgctttacggtatcgccgctcccgattcgcagcgcatcgccttctatcgccttcttgacgagttcttctgaattattaacgcttacaatttcctgatgcggtattttctccttacgcatctgtgcggtatttcacaccgcatacaggtggcacttttcggggaaatgtgcgcggaacccctatttgtttatttttctaaatacattcaaatatgtatccgctcatgagacaataaccctgataaatgcttcaataatagcacgtgaggagggccaccatggccaagttgaccagtgccgttccggtgctcaccgcgcgcgacgtcgccggagcggtcgagttctggaccgaccggctcgggttctcccgggacttcgtggaggacgacttcgccggtgtggtccgggacgacgtgaccctgttcatcagcgcggtccaggaccaggtggtgccggacaacaccctggcctgggtgtgggtgcgcggcctggacgagctgtacgccgagtggtcggaggtcgtgtccacgaacttccgggacgcctccgggccggccatgaccgagatcggcgagcagccgtgggggcgggagttcgccctgcgcgacccggccggcaactgcgtgcacttcgtggccgaggagcaggactgacacgtgctaaaacttcatttttaatttaaaaggatctaggtgaagatcctttttgataatctcatgaccaaaatcccttaacgtgagttttcgttccactgagcgtcagaccccgtagaaaagatcaaaggatcttcttgagatcctttttttctgcgcgtaatctgctgcttgcaaacaaaaaaaccaccgctaccagcggtggtttgtttgccggatcaagagctaccaactctttttccgaaggtaactggcttcagcagagcgcagataccaaatactgtccttctagtgtagccgtagttaggccaccacttcaagaactctgtagcaccgcctacatacctcgctctgctaatcctgttaccagtggctgctgccagtggcgataagtcgtgtcttaccgggttggactcaagacgatagttaccggataaggcgcagcggtcgggctgaacggggggttcgtgcacacagcccagcttggagcgaacgacctacaccgaactgagatacctacagcgtgagctatgagaaagcgccacgcttcccgaagggagaaaggcggacaggtatccggtaagcggcagggtcggaacaggagagcgcacgagggagcttccagggggaaacgcctggtatctttatagtcctgtcgggtttcgccacctctgacttgagcgtcgatttttgtgatgctcgtcaggggggcggagcctatggaaaaacgccagcaacgcggcctttttacggttcctgggcttttgctggccttttgctcacatgttctttcctgcgttatcccctgattctgtggataaccgtattaccgcctttgagtgagctgataccgctcgccgcagccgaacgaccgagcgcagcgagtcagtgagcgaggaagcggaag

SEQ ID NO: 146 - DNA, 4930 bp, Artificial Sequence
  Synthetic
agcgcccaatacgcaaaccgcctctccccgcgcgttggccgattcattaatgcagctggcacgacaggtttcccgactggaaagcgggcagtgagcgcaacgcaattaatgtgagttagctcactcattaggcaccccaggctttacactttatgcttccggctcgtatgttgtgtggaattgtgagcggataacaatttcacacaggaaacagctatgaccatgattacgccaagctatttaggtgacactatagaatactcaagctatgcatcaagcttggtaccgagctcggatccactagtaacggccgccagtgtgctggaattcgccctttattaccgcctttgagtgagctgataccgctcgccgcagccgaacgaccgagcgcagcgagtcagtgagcgaggaagctcgaggcagtgaaaaaaatgctttatttgtgaaatttgtgatgctattgctttatttgtaaccattataagctgcaataaacaagttaacaacaacaattgcattcattttatgtttcaggttcagggggaggtgtgggaggttttttaaagcaagtaaaacctctacaaatgtggtatggctgattatgatcctctagagatatcgtcgacaagcttatcgatgcggccgcgctagcacgcgtcagctgactagaggatccccgggtaccgagctcgaattcttacttgtacagctcgtccatgccgtacaggaacaggtggtggcggccctcggagcgctcgtactgttccacgatggtgtagtcctcgttgtgggaggtgatgtccagcttggtgtccacgtagtagtagccgggcagttgcacgggcttcttggccatgtagatggtcttgaactccaccaggtagtggccgccgtccttcagcttcagggcctggtggatctcgcccttcagcacgccgtcgcgggggtacaggcgctcggtggaggcctcccagcccatggtcttcttctgcattacggggccgtcgggggggaagttggtgccgcgcatcttcaccttgtagatcagcgtgccgtcctgcagggaggagtcctgggtcacggtcaccagaccgccgtcctcgaagttcatcacgcgctcccacttgaagccctcggggaaggacagcttcttgtaatcggggatgtcggcggggtgcttcacgtacgccttggagccgtacatgaactggggggacaggatgtcccaggcgaagggcagggggccgcccttggtcaccttcagcttggcggtctgggtgccctcgtaggggcggccctcgccctcgccctcgatctcgaactcgtggccgttcatggagccctccatgcgcaccttgaagcgcatgaactctttgatgacctcctcgcccttgctcacggtggaacccagtccgccaccggaagttttatcgtcgtcatccttgtagtccatggtggcgaattctccaggcgatctgacggttcactaaacgagctctgcttatataggcctcccaccgtacacgcctacctcgcacctttcatacaaagtatccacacttgtagtaaactttcgaaagtatggtacactttttatacaatgcaaggtataggtgttttgattcaacatatagttgtattgttgcaatgtatggttgtatttacaaactcacaaaggaatgacagatgaggctcttccgcttcctcgctcactgactcgcttggtactattaccctgttatccctaaagggcgaattctgcagatatccatcacactggcggccgctcgagcatgcatctagagggcccaattcgccctatagtgagtcgtattacaattcactggccgtcgttttacaacgtcgtgactgggaaaaccctggcgttacccaacttaatcgccttgcagcacatccccctttcgccagctggcgtaatagcgaagaggcccgcaccgatcgcccttcccaacagttgcgcagcctatacgtacggcagtttaaggtttacacctataaaagagagagccgttatcgtctgtttgtggatgtacagagtgatattattgacacgccggggcgacggatggtgatccccctggccagtgcacgtctgctgtcagataaagtctcccgtgaactttacccggtggtgcatatcggggatgaaagctggcgcatgatgaccaccgatatggccagtgtgccggtctccgttatcggggaagaagtggctgatctcagccaccgcgaaaatgacatcaaaaacgccattaacctgatgttctggggaatataaatgtcaggcatgagattatcaaaaaggatcttcacctagatccttttcacgtagaaagccagtccgcagaaacggtgctgaccccggatgaatgtcagctactgggctatctggacaagggaaaacgcaagcgcaaagagaaagcaggtagcttgcagtgggcttacatggcgatagctagactgggcggttttatggacagcaagcgaaccggaattgccagctggggcgccctctggtaaggttgggaagccctgcaaagtaaactggatggctttctcgccgccaaggatctgatggcgcaggggatcaagctctgatcaagagacaggatgaggatcgtttcgcatgattgaacaagatggattgcacgcaggttctccggccgcttgggtggagaggctattcggctatgactgggcacaacagacaatcggctgctctgatgccgccgtgttccggctgtcagcgcaggggcgcccggttctttttgtcaagaccgacctgtccggtgccctgaatgaactgcaagacgaggcagcgcggctatcgtggctggccacgacgggcgttccttgcgcagctgtgctcgacgttgtcactgaagcgggaagggactggctgctattgggcgaagtgccggggcaggatctcctgtcatctcaccttgctcctgccgagaaagtatccatcatggctgatgcaatgcggcggctgcatacgcttgatccggctacctgcccattcgaccaccaagcgaaacatcgcatcgagcgagcacgtactcggatggaagccggtcttgtcgatcaggatgatctggacgaagagcatcaggggctcgcgccagccgaactgttcgccaggctcaaggcgagcatgcccgacggcgaggatctcgtcgtgacccatggcgatgcctgcttgccgaatatcatggtggaaaatggccgcttttctggattcatcgactgtggccggctgggtgtggcggaccgctatcaggacatagcgttggctacccgtgatattgctgaagagcttggcggcgaatgggctgaccgcttcctcgtgctttacggtatcgccgctcccgattcgcagcgcatcgccttctatcgccttcttgacgagttcttctgaattattaacgcttacaatttcctgatgcggtattttctccttacgcatctgtgcggtatttcacaccgcatacaggtggcacttttcggggaaatgtgcgcggaacccctatttgtttatttttctaaatacattcaaatatgtatccgctcatgagacaataaccctgataaatgcttcaataatagcacgtgaggagggccaccatggccaagttgaccagtgccgttccggtgctcaccgcgcgcgacgtcgccggagcggtcgagttctggaccgaccggctcgggttctcccgggacttcgtggaggacgacttcgccggtgtggtccgggacgacgtgaccctgttcatcagcgcggtccaggaccaggtggtgccggacaacaccctggcctgggtgtgggtgcgcggcctggacgagctgtacgccgagtggtcggaggtcgtgtccacgaacttccgggacgcctccgggccggccatgaccgagatcggcgagcagccgtgggggcgggagttcgccctgcgcgacccggccggcaactgcgtgcacttcgtggccgaggagcaggactgacacgtgctaaaacttcatttttaatttaaaaggatctaggtgaagatcctttttgataatctcatgaccaaaatcccttaacgtgagttttcgttccactgagcgtcagaccccgtagaaaagatcaaaggatcttcttgagatcctttttttctgcgcgtaatctgctgcttgcaaacaaaaaaaccaccgctaccagcggtggtttgtttgccggatcaagagctaccaactctttttccgaaggtaactggcttcagcagagcgcagataccaaatactgtccttctagtgtagccgtagttaggccaccacttcaagaactctgtagcaccgcctacatacctcgctctgctaatcctgttaccagtggctgctgccagtggcgataagtcgtgtcttaccgggttggactcaagacgatagttaccggataaggcgcagcggtcgggctgaacggggggttcgtgcacacagcccagcttggagcgaacgacctacaccgaactgagatacctacagcgtgagctatgagaaagcgccacgcttcccgaagggagaaaggcggacaggtatccggtaagcggcagggtcggaacaggagagcgcacgagggagcttccagggggaaacgcctggtatctttatagtcctgtcgggtttcgccacctctgacttgagcgtcgatttttgtgatgctcgtcaggggggcggagcctatggaaaaacgccagcaacgcggcctttttacggttcctgggcttttgctggccttttgctcacatgttctttcctgcgttatcccctgattctgtggataaccgtattaccgcctttgagtgagctgataccgctcgccgcagccgaacgaccgagcgcagcgagtcagtgagcgaggaagcggaag

SEQ ID NO: 147 - DNA, 7473 bp, Artificial Sequence
  Synthetic
gacggatcgggagatctcccgatcccctatggtgcactctcagtacaatctgctctgatgccgcatagttaagccagtatctgctccctgcttgtgtgttggaggtcgctgagtagtgcgcgagcaaaatttaagctacaacaaggcaaggcttgaccgacaattgcatgaagaatctgcttagggttaggcgttttgcgctgcttcgcgatgtacgggccagatatacgcgttgacattgattattgactagttattaatagtaatcaattacggggtcattagttcatagcccatatatggagttccgcgttacataacttacggtaaatggcccgcctggctgaccgcccaacgacccccgcccattgacgtcaataatgacgtatgttcccatagtaacgccaatagggactttccattgacgtcaatgggtggagtatttacggtaaactgcccacttggcagtacatcaagtgtatcatatgccaagtacgccccctattgacgtcaatgacggtaaatggcccgcctggcattatgcccagtacatgaccttatgggactttcctacttggcagtacatctacgtattagtcatcgctattaccatggtgatgcggttttggcagtacatcaatgggcgtggatagcggtttgactcacggggatttccaagtctccaccccattgacgtcaatgggagtttgttttggcaccaaaatcaacgggactttccaaaatgtcgtaacaactccgccccattgacgcaaatgggcggtaggcgtgtacggtgggaggtctatataagcagagctctctggctaactagagaacccactgcttactggcttatcgaaattaatacgactcactatagggagacccaagctggctagcgtttaaacttaagcttggtaccgccaccatgtttaacgacggcctgtttgacgatgagttcaatcagccactgcccaaggtggagaccaagctgccccagaactacgccaaggatctgcaggccctgcctgagaagatcaagaataccacattcgccaagctgaagtatatccagtggctggaggccaacatccagggcggctggacacagaagaatctggagccactgctgaaagtgatgcccgaggtggagggcgagaagaagccaagctggaggaccgcagcaaggtggtattccgcctacacaaacgccgacaagaatatcatggccctgatccctagccaccagaagaagggcaatagggagcgcgacaccgccaccgataagttctttgagaaggccctggagagatacctggtgaaggagaagccttccgtggcctctgcctataagtactatgccgacctggtcatcatcgagaacgattccgtggtgggctctgtgctgaagcctctgacctacaaggcctttaagaaccgcatcgacaatctgccacagtatgatgtgatggtgtcccggtacggcaagagactggccgacatcgccttcaataaggtggagggccacacccggccaacaagagtgctggagaaggtggagatcgaccacacacccctggatctgatcctgctggacgatgagctgcacatcccactgggccggcccaccctgacaatgctggtggacgtgtattctcactgcatcgtgggcttctacttttctttcagcgagcccagctatgatgccgtgcggagagccatgctgaatgccatgaagcctaagagcgacgtggccaagctgtacccagataccatcaacgagtggaagtgcgccggcaagatcgagacactggtggtggacaacggcgccgagttctggtccaattctctggagctggcctgtgaggagatcggcatcaacacccagtacaatcctgtggccaagccctggctgaagccctttgtggagcggatgttcggcaccatcaacacagagctgctggaccccgtgcccggcaagacattttctaacatcctgcagaagcacgagtataatccaaagaaggacgccatcatgcggtttaccacattcatgcagctgttccacaagtgggtggtggacgtgtaccaccaggacgccgacagccggttcaagtatatcccctctcagctgtgggagcagggcttcaacaccctgccccctacagtgctgtccaatgccgacctgcagcagctggatgtggtgctgagcatctccaatcacagggtgctgcgcaagggaggcatcaggctggagaacctgagctacgactccaccgagctggccaattatcgcaagcagtttagccacaaggtgtcccaggaggtgctgatcaagctgaaccctgacgatatcagctacatctacgtgtacctggacaagctggagcactacatcaaggtgccttgtatcgatccaaacggctatacccagaacctgtccctgaatcagcacaagatcaatatcagaatccacagagacttcatctctggcagcatcgataacgtgggcctggccaaggccagaatgtttatccacaacaagatccagaatgagttcgaggagctgaagaatgccccaaagcactccaaggtgaagggcggcaaggccctggccaagcaccagaacgtgagctccgactctcagaagagcatcgcccagtctgagcccctggagcctaagaaggtgacccccaaggagcagcctacagattcttgggacgacttcatcagcgacctggatggcttcggctccggaaaacggacagccgacggaagcgagttcgagtcaccgaaaaagaagcgaaaagttggtggtagtggtggaagcggcgaggccagcggttccggacgggctgacgcattggacgattttgatctggatatgctgggaagtgacgccctcgatgattttgaccttgacatgcttggttcggatgcccttgatgactttgacctcgacatgctcggcagtgacgcccttgatgatttcgacctggacatgctgattaactctagatgagcggccgctcgagtctagagggcccgtttaaacccgctgatcagcctcgactgtgccttctagttgccagccatctgttgtttgcccctcccccgtgccttccttgaccctggaaggtgccactcccactgtcctttcctaataaaatgaggaaattgcatcgcattgtctgagtaggtgtcattctattctggggggtggggtggggcaggacagcaagggggaggattgggaagacaatagcaggcatgctggggatgcggtgggctctatggcttctgaggcggaaagaaccagctggggctctagggggtatccccacgcgccctgtagcggcgcattaagcgcggcgggtgtggtggttacgcgcagcgtgaccgctacacttgccagcgccctagcgcccgctcctttcgctttcttcccttcctttctcgccacgttcgccggctttccccgtcaagctctaaatcgggggctccctttagggttccgatttagtgctttacggcacctcgaccccaaaaaacttgattagggtgatggttcacgtagtgggccatcgccctgatagacggtttttcgccctttgacgttggagtccacgttctttaatagtggactcttgttccaaactggaacaacactcaaccctatctcggtctattcttttgatttataagggattttgccgatttcggcctattggttaaaaaatgagctgatttaacaaaaatttaacgcgaattaattctgtggaatgtgtgtcagttagggtgtggaaagtccccaggctccccagcaggcagaagtatgcaaagcatgcatctcaattagtcagcaaccaggtgtggaaagtccccaggctccccagcaggcagaagtatgcaaagcatgcatctcaattagtcagcaaccatagtcccgcccctaactccgcccatcccgcccctaactccgcccagttccgcccattctccgccccatggctgactaattttttttatttatgcagaggccgaggccgcctctgcctctgagctattccagaagtagtgaggaggcttttttggaggcctaggcttttgcaaaaagctcccgggagcttgtatatccattttcggatctgatcaagagacaggatgaggatcgtttcgcatgattgaacaagatggattgcacgcaggttctccggccgcttgggtggagaggctattcggctatgactgggcacaacagacaatcggctgctctgatgccgccgtgttccggctgtcagcgcaggggcgcccggttctttttgtcaagaccgacctgtccggtgccctgaatgaactgcaggacgaggcagcgcggctatcgtggctggccacgacgggcgttccttgcgcagctgtgctcgacgttgtcactgaagcgggaagggactggctgctattgggcgaagtgccggggcaggatctcctgtcatctcaccttgctcctgccgagaaagtatccatcatggctgatgcaatgcggcggctgcatacgcttgatccggctacctgcccattcgaccaccaagcgaaacatcgcatcgagcgagcacgtactcggatggaagccggtcttgtcgatcaggatgatctggacgaagagcatcaggggctcgcgccagccgaactgttcgccaggctcaaggcgcgcatgcccgacggcgaggatctcgtcgtgacccatggcgatgcctgcttgccgaatatcatggtggaaaatggccgcttttctggattcatcgactgtggccggctgggtgtggcggaccgctatcaggacatagcgttggctacccgtgatattgctgaagagcttggcggcgaatgggctgaccgcttcctcgtgctttacggtatcgccgctcccgattcgcagcgcatcgccttctatcgccttcttgacgagttcttctgagcgggactctggggttcgaaatgaccgaccaagcgacgcccaacctgccatcacgagatttcgattccaccgccgccttctatgaaaggttgggcttcggaatcgttttccgggacgccggctggatgatcctccagcgcggggatctcatgctggagttcttcgcccaccccaacttgtttattgcagcttataatggttacaaataaagcaatagcatcacaaatttcacaaataaagcatttttttcactgcattctagttgtggtttgtccaaactcatcaatgtatcttatcatgtctgtataccgtcgacctctagctagagcttggcgtaatcatggtcatagctgtttcctgtgtgaaattgttatccgctcacaattccacacaacatacgagccggaagcataaagtgtaaagcctggggtgcctaatgagtgagctaactcacattaattgcgttgcgctcactgcccgctttccagtcgggaaacctgtcgtgccagctgcattaatgaatcggccaacgcgcggggagaggcggtttgcgtattgggcgctcttccgcttcctcgctcactgactcgctgcgctcggtcgttcggctgcggcgagcggtatcagctcactcaaaggcggtaatacggttatccacagaatcaggggataacgcaggaaagaacatgtgagcaaaaggccagcaaaaggccaggaaccgtaaaaaggccgcgttgctggcgtttttccataggctccgcccccctgacgagcatcacaaaaatcgacgctcaagtcagaggtggcgaaacccgacaggactataaagataccaggcgtttccccctggaagctccctcgtgcgctctcctgttccgaccctgccgcttaccggatacctgtccgcctttctcccttcgggaagcgtggcgctttctcatagctcacgctgtaggtatctcagttcggtgtaggtcgttcgctccaagctgggctgtgtgcacgaaccccccgttcagcccgaccgctgcgccttatccggtaactatcgtcttgagtccaacccggtaagacacgacttatcgccactggcagcagccactggtaacaggattagcagagcgaggtatgtaggcggtgctacagagttcttgaagtggtggcctaactacggctacactagaagaacagtatttggtatctgcgctctgctgaagccagttaccttcggaaaaagagttggtagctcttgatccggcaaacaaaccaccgctggtagcggtttttttgtttgcaagcagcagattacgcgcagaaaaaaaggatctcaagaagatcctttgatcttttctacggggtctgacgctcagtggaacgaaaactcacgttaagggattttggtcatgagattatcaaaaaggatcttcacctagatccttttaaattaaaaatgaagttttaaatcaatctaaagtatatatgagtaaacttggtctgacagttaccaatgcttaatcagtgaggcacctatctcagcgatctgtctatttcgttcatccatagttgcctgactccccgtcgtgtagataactacgatacgggagggcttaccatctggccccagtgctgcaatgataccgcgagacccacgctcaccggctccagatttatcagcaataaaccagccagccggaagggccgagcgcagaagtggtcctgcaactttatccgcctccatccagtctattaattgttgccgggaagctagagtaagtagttcgccagttaatagtttgcgcaacgttgttgccattgctacaggcatcgtggtgtcacgctcgtcgtttggtatggcttcattcagctccggttcccaacgatcaaggcgagttacatgatcccccatgttgtgcaaaaaagcggttagctccttcggtcctccgatcgttgtcagaagtaagttggccgcagtgttatcactcatggttatggcagcactgcataattctcttactgtcatgccatccgtaagatgcttttctgtgactggtgagtactcaaccaagtcattctgagaatagtgtatgcggcgaccgagttgctcttgcccggcgtcaatacgggataataccgcgccacatagcagaactttaaaagtgctcatcattggaaaacgttcttcggggcgaaaactctcaaggatcttaccgctgttgagatccagttcgatgtaacccactcgtgcacccaactgatcttcagcatcttttactttcaccagcgtttctgggtgagcaaaaacaggaaggcaaaatgccgcaaaaaagggaataagggcgacacggaaatgttgaatactcatactcttcctttttcaatattattgaagcatttatcagggttattgtctcatgagcggatacatatttgaatgtatttagaaaaataaacaaataggggttccgcgcacatttccccgaaaagtgccacctgacgtc

SEQ ID NO: 148 - DNA, 7518 bp, Artificial Sequence
  Synthetic
gacggatcgggagatctcccgatcccctatggtgcactctcagtacaatctgctctgatgccgcatagttaagccagtatctgctccctgcttgtgtgttggaggtcgctgagtagtgcgcgagcaaaatttaagctacaacaaggcaaggcttgaccgacaattgcatgaagaatctgcttagggttaggcgttttgcgctgcttcgcgatgtacgggccagatatacgcgttgacattgattattgactagttattaatagtaatcaattacggggtcattagttcatagcccatatatggagttccgcgttacataacttacggtaaatggcccgcctggctgaccgcccaacgacccccgcccattgacgtcaataatgacgtatgttcccatagtaacgccaatagggactttccattgacgtcaatgggtggagtatttacggtaaactgcccacttggcagtacatcaagtgtatcatatgccaagtacgccccctattgacgtcaatgacggtaaatggcccgcctggcattatgcccagtacatgaccttatgggactttcctacttggcagtacatctacgtattagtcatcgctattaccatggtgatgcggttttggcagtacatcaatgggcgtggatagcggtttgactcacggggatttccaagtctccaccccattgacgtcaatgggagtttgttttggcaccaaaatcaacgggactttccaaaatgtcgtaacaactccgccccattgacgcaaatgggcggtaggcgtgtacggtgggaggtctatataagcagagctctctggctaactagagaacccactgcttactggcttatcgaaattaatacgactcactatagggagacccaagctggctagcgtttaaacttaagcttggtaccgccaccatggccaaggacatctccaccggcctgttccaggatgagatggcagtggccagctcctctgagccagtggaggccctgcctagctccacagacgatttctttgagcgcgacctggcctcttaccctgatgagatccagatcgaggtgcggagaaggatcgagtatctgcagtggatcgagaagcacctggtgggcggctggacccagaagaacctggacccactgatcgagaaggccgccagagagatcgattttccccctccaaagtggagggccctggccaagtggtggtccgtgtactctagctccggcaagatgctggcctctctggtgcccaagctgcaccgcaagggcaaccggaatctgaagatcaccaatgagctgagcttctttgacagagccgtggagagatacctggtgcccgagcgcccatccatctctgccgtgtatcagtactataccgacctgatcagaatcgagaaccagcacctggtgggcgagaaggtgcaggccctgtcctacaagggcttctataatcgcatcaagaagctgccagcatacgaggtggcagtggcacggcacggcaagtatctggccgacatggagtttaacaagatcgatgcacaccagccacctagccgcgtgctggagaaggtggagatcgaccactcccctctggatctgatcctgctggacgatgagctgaatatcccactgggccggccttacctgaccctgctgatcgaccagtatagcaagtccatcatgggcttccacctgggctttaaggagccatcttactatagcgtgatgaaggccatcctgaacgccatcaagccaaaggacgatatcgccgagagattccccggcgtggtgcacgactggtactgccagggcaagatggagagcctggtggtggataacggcgccgagttttggtctaagagcctggagcagtcctgtctggaggtcggcatccacatccagtataatccagtgaggaagccctggctgaagcctctggtggagcgcatcttcagaaccatcggcagcaagctgctggtgaccatccccggcaagacattttctaacatcctggcccgcgaggagtacgaccctcggaaggatgccgtgatgcacttcagcgtgtttaatgagctgttccacaagtggatcatcgacgtgtaccactatgagtccgacagccggaagagggccatcccatacgtgaagtggcaggagggcgtggtggtcatgccacccatctcttatgagcccgaggacctggagaagctgagcgtggtgctgggcatcaaggagctgagaaagcacaggaggggaggcatccacctgcacggcctgaggtacgactctgaggagctggccgattacagaaggatgtatagcagagacatcgatgtgctgaccaagacaaaccccgacgatatctctagcatctacgtgtatctggagcacaagcagcagtacctgaaggtgccatgcatcgaccccatcggctataccaagagcctgtccctgacacagcaccacatcaatcagagactgcacagggacttcatcgattcccagctggatctggagggcctggcccgcgtgcggatgtacatccacgacagaatcgagcaggaggccgatgagatcaagaacctgaatagaggcaggccccgccggaccacaaagggaatggccaggctggccaagcacaatggcgtggcctccgacgtgcagacctcttgcgtgcccgagaccctgcccgagctgtctatgcctgataagggcaaggagagcaagcagctgccagactccgatgagtgggacgacttcatcagcgacctggagccttatggctccggaaaacggacagccgacggaagcgagttcgagtcaccgaaaaagaagcgaaaagttggtggtagtggtggaagcggcgaggccagcggttccggacgggctgacgcattggacgattttgatctggatatgctgggaagtgacgccctcgatgattttgaccttgacatgcttggttcggatgcccttgatgactttgacctcgacatgctcggcagtgacgcccttgatgatttcgacctggacatgctgattaactctagatgagcggccgctcgagtctagagggcccgtttaaacccgctgatcagcctcgactgtgccttctagttgccagccatctgttgtttgcccctcccccgtgccttccttgaccctggaaggtgccactcccactgtcctttcctaataaaatgaggaaattgcatcgcattgtctgagtaggtgtcattctattctggggggtggggtggggcaggacagcaagggggaggattgggaagacaatagcaggcatgctggggatgcggtgggctctatggcttctgaggcggaaagaaccagctggggctctagggggtatccccacgcgccctgtagcggcgcattaagcgcggcgggtgtggtggttacgcgcagcgtgaccgctacacttgccagcgccctagcgcccgctcctttcgctttcttcccttcctttctcgccacgttcgccggctttccccgtcaagctctaaatcgggggctccctttagggttccgatttagtgctttacggcacctcgaccccaaaaaacttgattagggtgatggttcacgtagtgggccatcgccctgatagacggtttttcgccctttgacgttggagtccacgttctttaatagtggactcttgttccaaactggaacaacactcaaccctatctcggtctattcttttgatttataagggattttgccgatttcggcctattggttaaaaaatgagctgatttaacaaaaatttaacgcgaattaattctgtggaatgtgtgtcagttagggtgtggaaagtccccaggctccccagcaggcagaagtatgcaaagcatgcatctcaattagtcagcaaccaggtgtggaaagtccccaggctccccagcaggcagaagtatgcaaagcatgcatctcaattagtcagcaaccatagtcccgcccctaactccgcccatcccgcccctaactccgcccagttccgcccattctccgccccatggctgactaattttttttatttatgcagaggccgaggccgcctctgcctctgagctattccagaagtagtgaggaggcttttttggaggcctaggcttttgcaaaaagctcccgggagcttgtatatccattttcggatctgatcaagagacaggatgaggatcgtttcgcatgattgaacaagatggattgcacgcaggttctccggccgcttgggtggagaggctattcggctatgactgggcacaacagacaatcggctgctctgatgccgccgtgttccggctgtcagcgcaggggcgcccggttctttttgtcaagaccgacctgtccggtgccctgaatgaactgcaggacgaggcagcgcggctatcgtggctggccacgacgggcgttccttgcgcagctgtgctcgacgttgtcactgaagcgggaagggactggctgctattgggcgaagtgccggggcaggatctcctgtcatctcaccttgctcctgccgagaaagtatccatcatggctgatgcaatgcggcggctgcatacgcttgatccggctacctgcccattcgaccaccaagcgaaacatcgcatcgagcgagcacgtactcggatggaagccggtcttgtcgatcaggatgatctggacgaagagcatcaggggctcgcgccagccgaactgttcgccaggctcaaggcgcgcatgcccgacggcgaggatctcgtcgtgacccatggcgatgcctgcttgccgaatatcatggtggaaaatggccgcttttctggattcatcgactgtggccggctgggtgtggcggaccgctatcaggacatagcgttggctacccgtgatattgctgaagagcttggcggcgaatgggctgaccgcttcctcgtgctttacggtatcgccgctcccgattcgcagcgcatcgccttctatcgccttcttgacgagttcttctgagcgggactctggggttcgaaatgaccgaccaagcgacgcccaacctgccatcacgagatttcgattccaccgccgccttctatgaaaggttgggcttcggaatcgttttccgggacgccggctggatgatcctccagcgcggggatctcatgctggagttcttcgcccaccccaacttgtttattgcagcttataatggttacaaataaagcaatagcatcacaaatttcacaaataaagcatttttttcactgcattctagttgtggtttgtccaaactcatcaatgtatcttatcatgtctgtataccgtcgacctctagctagagcttggcgtaatcatggtcatagctgtttcctgtgtgaaattgttatccgctcacaattccacacaacatacgagccggaagcataaagtgtaaagcctggggtgcctaatgagtgagctaactcacattaattgcgttgcgctcactgcccgctttccagtcgggaaacctgtcgtgccagctgcattaatgaatcggccaacgcgcggggagaggcggtttgcgtattgggcgctcttccgcttcctcgctcactgactcgctgcgctcggtcgttcggctgcggcgagcggtatcagctcactcaaaggcggtaatacggttatccacagaatcaggggataacgcaggaaagaacatgtgagcaaaaggccagcaaaaggccaggaaccgtaaaaaggccgcgttgctggcgtttttccataggctccgcccccctgacgagcatcacaaaaatcgacgctcaagtcagaggtggcgaaacccgacaggactataaagataccaggcgtttccccctggaagctccctcgtgcgctctcctgttccgaccctgccgcttaccggatacctgtccgcctttctcccttcgggaagcgtggcgctttctcatagctcacgctgtaggtatctcagttcggtgtaggtcgttcgctccaagctgggctgtgtgcacgaaccccccgttcagcccgaccgctgcgccttatccggtaactatcgtcttgagtccaacccggtaagacacgacttatcgccactggcagcagccactggtaacaggattagcagagcgaggtatgtaggcggtgctacagagttcttgaagtggtggcctaactacggctacactagaagaacagtatttggtatctgcgctctgctgaagccagttaccttcggaaaaagagttggtagctcttgatccggcaaacaaaccaccgctggtagcggtttttttgtttgcaagcagcagattacgcgcagaaaaaaaggatctcaagaagatcctttgatcttttctacggggtctgacgctcagtggaacgaaaactcacgttaagggattttggtcatgagattatcaaaaaggatcttcacctagatccttttaaattaaaaatgaagttttaaatcaatctaaagtatatatgagtaaacttggtctgacagttaccaatgcttaatcagtgaggcacctatctcagcgatctgtctatttcgttcatccatagttgcctgactccccgtcgtgtagataactacgatacgggagggcttaccatctggccccagtgctgcaatgataccgcgagacccacgctcaccggctccagatttatcagcaataaaccagccagccggaagggccgagcgcagaagtggtcctgcaactttatccgcctccatccagtctattaattgttgccgggaagctagagtaagtagttcgccagttaatagtttgcgcaacgttgttgccattgctacaggcatcgtggtgtcacgctcgtcgtttggtatggcttcattcagctccggttcccaacgatcaaggcgagttacatgatcccccatgttgtgcaaaaaagcggttagctccttcggtcctccgatcgttgtcagaagtaagttggccgcagtgttatcactcatggttatggcagcactgcataattctcttactgtcatgccatccgtaagatgcttttctgtgactggtgagtactcaaccaagtcattctgagaatagtgtatgcggcgaccgagttgctcttgcccggcgtcaatacgggataataccgcgccacatagcagaactttaaaagtgctcatcattggaaaacgttcttcggggcgaaaactctcaaggatcttaccgctgttgagatccagttcgatgtaacccactcgtgcacccaactgatcttcagcatcttttactttcaccagcgtttctgggtgagcaaaaacaggaaggcaaaatgccgcaaaaaagggaataagggcgacacggaaatgttgaatactcatactcttcctttttcaatattattgaagcatttatcagggttattgtctcatgagcggatacatatttgaatgtatttagaaaaataaacaaataggggttccgcgcacatttccccgaaaagtgccacctgacgtc

SEQ ID NO: 149 - DNA, 7503 bp, Artificial Sequence
  Synthetic
gacggatcgggagatctcccgatcccctatggtgcactctcagtacaatctgctctgatgccgcatagttaagccagtatctgctccctgcttgtgtgttggaggtcgctgagtagtgcgcgagcaaaatttaagctacaacaaggcaaggcttgaccgacaattgcatgaagaatctgcttagggttaggcgttttgcgctgcttcgcgatgtacgggccagatatacgcgttgacattgattattgactagttattaatagtaatcaattacggggtcattagttcatagcccatatatggagttccgcgttacataacttacggtaaatggcccgcctggctgaccgcccaacgacccccgcccattgacgtcaataatgacgtatgttcccatagtaacgccaatagggactttccattgacgtcaatgggtggagtatttacggtaaactgcccacttggcagtacatcaagtgtatcatatgccaagtacgccccctattgacgtcaatgacggtaaatggcccgcctggcattatgcccagtacatgaccttatgggactttcctacttggcagtacatctacgtattagtcatcgctattaccatggtgatgcggttttggcagtacatcaatgggcgtggatagcggtttgactcacggggatttccaagtctccaccccattgacgtcaatgggagtttgttttggcaccaaaatcaacgggactttccaaaatgtcgtaacaactccgccccattgacgcaaatgggcggtaggcgtgtacggtgggaggtctatataagcagagctctctggctaactagagaacccactgcttactggcttatcgaaattaatacgactcactatagggagacccaagctggctagcgtttaaacttaagcttggtaccgccaccatgatcgagttcaaggacgagtttaccgagtctacaagcgtgaagaagcccgatacccctggccagtacatcaagctggacgatgccgagatcctgaagagggacctggatacattccctgactttctgaaggagaaggccttcgataagtataagctgatctcctttatcgagcaggagaactctggcggctggacccagaagaagctggaccctatcctggataagctgttcgagggcaacagggacaagcgcccaaattggcggacagtggtgcggtggagaaagagctacatcgactccaacggcgatctggcctccctggtggtgaagagacacaagatgggcaatcggaagaagagagtggagggcgacgaggtgttctttgagcgggccctgagccggttcctggacgcaaagaggccaaaggtgaccacagcctatcagtactataaggacgccatcaccatcgagaacgagacaatcgtggatggcgagatccctatcatctcctacaccgcctttaatcagaggatcaagtctctgcccccttatccaatcgccgtggcacgccacggcaagttcaaggccgatcagtggtttgcctactgcagctcccacatcccacccaccagaatcctggagcgggtggagatcgaccacacacctctggatctgatcctgctggacgatgagctgcagctgccactgggcagaccctatctgaccctgatcgtggacgtgttcagcaactgcgtgctgggctttcacctgagctacaaggccccatcttatgtgagcgccgcaaaggccatcgtgcacgccatcaagcccaagaccctgggcatcgtgggcatcgagctgcagaacgattggccttgctacggcaagttcgagacactggtggtggacaatggcgccgagttttggtccaagtctctggatcacgcctgtaaggaggccggcatcaacatccagtataatcctgtgaggaagccctggctgaagcccttcgtggagcggttcttcggcatgatcaaccagtacttcctgaccgagctgccaggcaagacattttctaatatcctggagaaggaggactataagcccgagaaggatgccatcatgcggttcagcgtgtttgtggaggagtttcacagatggatcgtggacatctaccaccaggacagcgattccagggatacccgcatcccaatcaagcagtggcagcacggcttcgacgtgtatcctccactgcagatgagcgtggaggatgagaagaggtttaacgtgctgatgggcatcaccgacgagcggaccctgacaagaaatggcttcaagtttgaggagctgatgtacgacagcacagccctggccgattaccgcaagcactatccccagaccaaggacacaatcaagaagctgatcaagatcgatcctgacgatctgtccaacatccacgtgtacctggaggagctggagggctatctgaaggtgccctgcaccgacaccacaggctacgccaatggcctgagcctgcacgagcacaaagtgatcaagaagatcaacagggagatcatccgcgagtccaaggataatctgggcctggccaaggcaaggatggcaatccacgccagagtgcagcaggagcaggagctgttcaacgagagcaagacaaaggccaagatcagcgccgtgaagaagcaggcacagctggccgacatctccaacaccggccagggcacaatcagactggagaattctgacaccctgagcgatatcacaaacaagcccgagtccaatatctctgacatcctggataactgggacgataatatcgagggctttgagggctccggaaaacggacagccgacggaagcgagttcgagtcaccgaaaaagaagcgaaaagttggtggtagtggtggaagcggcgaggccagcggttccggacgggctgacgcattggacgattttgatctggatatgctgggaagtgacgccctcgatgattttgaccttgacatgcttggttcggatgcccttgatgactttgacctcgacatgctcggcagtgacgcccttgatgatttcgacctggacatgctgattaactctagatgagcggccgctcgagtctagagggcccgtttaaacccgctgatcagcctcgactgtgccttctagttgccagccatctgttgtttgcccctcccccgtgccttccttgaccctggaaggtgccactcccactgtcctttcctaataaaatgaggaaattgcatcgcattgtctgagtaggtgtcattctattctggggggtggggtggggcaggacagcaagggggaggattgggaagacaatagcaggcatgctggggatgcggtgggctctatggcttctgaggcggaaagaaccagctggggctctagggggtatccccacgcgccctgtagcggcgcattaagcgcggcgggtgtggtggttacgcgcagcgtgaccgctacacttgccagcgccctagcgcccgctcctttcgctttcttcccttcctttctcgccacgttcgccggctttccccgtcaagctctaaatcgggggctccctttagggttccgatttagtgctttacggcacctcgaccccaaaaaacttgattagggtgatggttcacgtagtgggccatcgccctgatagacggtttttcgccctttgacgttggagtccacgttctttaatagtggactcttgttccaaactggaacaacactcaaccctatctcggtctattcttttgatttataagggattttgccgatttcggcctattggttaaaaaatgagctgatttaacaaaaatttaacgcgaattaattctgtggaatgtgtgtcagttagggtgtggaaagtccccaggctccccagcaggcagaagtatgcaaagcatgcatctcaattagtcagcaaccaggtgtggaaagtccccaggctccccagcaggcagaagtatgcaaagcatgcatctcaattagtcagcaaccatagtcccgcccctaactccgcccatcccgcccctaactccgcccagttccgcccattctccgccccatggctgactaattttttttatttatgcagaggccgaggccgcctctgcctctgagctattccagaagtagtgaggaggcttttttggaggcctaggcttttgcaaaaagctcccgggagcttgtatatccattttcggatctgatcaagagacaggatgaggatcgtttcgcatgattgaacaagatggattgcacgcaggttctccggccgcttgggtggagaggctattcggctatgactgggcacaacagacaatcggctgctctgatgccgccgtgttccggctgtcagcgcaggggcgcccggttctttttgtcaagaccgacctgtccggtgccctgaatgaactgcaggacgaggcagcgcggctatcgtggctggccacgacgggcgttccttgcgcagctgtgctcgacgttgtcactgaagcgggaagggactggctgctattgggcgaagtgccggggcaggatctcctgtcatctcaccttgctcctgccgagaaagtatccatcatggctgatgcaatgcggcggctgcatacgcttgatccggctacctgcccattcgaccaccaagcgaaacatcgcatcgagcgagcacgtactcggatggaagccggtcttgtcgatcaggatgatctggacgaagagcatcaggggctcgcgccagccgaactgttcgccaggctcaaggcgcgcatgcccgacggcgaggatctcgtcgtgacccatggcgatgcctgcttgccgaatatcatggtggaaaatggccgcttttctggattcatcgactgtggccggctgggtgtggcggaccgctatcaggacatagcgttggctacccgtgatattgctgaagagcttggcggcgaatgggctgaccgcttcctcgtgctttacggtatcgccgctcccgattcgcagcgcatcgccttctatcgccttcttgacgagttcttctgagcgggactctggggttcgaaatgaccgaccaagcgacgcccaacctgccatcacgagatttcgattccaccgccgccttctatgaaaggttgggcttcggaatcgttttccgggacgccggctggatgatcctccagcgcggggatctcatgctggagttcttcgcccaccccaacttgtttattgcagcttataatggttacaaataaagcaatagcatcacaaatttcacaaataaagcatttttttcactgcattctagttgtggtttgtccaaactcatcaatgtatcttatcatgtctgtataccgtcgacctctagctagagcttggcgtaatcatggtcatagctgtttcctgtgtgaaattgttatccgctcacaattccacacaacatacgagccggaagcataaagtgtaaagcctggggtgcctaatgagtgagctaactcacattaattgcgttgcgctcactgcccgctttccagtcgggaaacctgtcgtgccagctgcattaatgaatcggccaacgcgcggggagaggcggtttgcgtattgggcgctcttccgcttcctcgctcactgactcgctgcgctcggtcgttcggctgcggcgagcggtatcagctcactcaaaggcggtaatacggttatccacagaatcaggggataacgcaggaaagaacatgtgagcaaaaggccagcaaaaggccaggaaccgtaaaaaggccgcgttgctggcgtttttccataggctccgcccccctgacgagcatcacaaaaatcgacgctcaagtcagaggtggcgaaacccgacaggactataaagataccaggcgtttccccctggaagctccctcgtgcgctctcctgttccgaccctgccgcttaccggatacctgtccgcctttctcccttcgggaagcgtggcgctttctcatagctcacgctgtaggtatctcagttcggtgtaggtcgttcgctccaagctgggctgtgtgcacgaaccccccgttcagcccgaccgctgcgccttatccggtaactatcgtcttgagtccaacccggtaagacacgacttatcgccactggcagcagccactggtaacaggattagcagagcgaggtatgtaggcggtgctacagagttcttgaagtggtggcctaactacggctacactagaagaacagtatttggtatctgcgctctgctgaagccagttaccttcggaaaaagagttggtagctcttgatccggcaaacaaaccaccgctggtagcggtttttttgtttgcaagcagcagattacgcgcagaaaaaaaggatctcaagaagatcctttgatcttttctacggggtctgacgctcagtggaacgaaaactcacgttaagggattttggtcatgagattatcaaaaaggatcttcacctagatccttttaaattaaaaatgaagttttaaatcaatctaaagtatatatgagtaaacttggtctgacagttaccaatgcttaatcagtgaggcacctatctcagcgatctgtctatttcgttcatccatagttgcctgactccccgtcgtgtagataactacgatacgggagggcttaccatctggccccagtgctgcaatgataccgcgagacccacgctcaccggctccagatttatcagcaataaaccagccagccggaagggccgagcgcagaagtggtcctgcaactttatccgcctccatccagtctattaattgttgccgggaagctagagtaagtagttcgccagttaatagtttgcgcaacgttgttgccattgctacaggcatcgtggtgtcacgctcgtcgtttggtatggcttcattcagctccggttcccaacgatcaaggcgagttacatgatcccccatgttgtgcaaaaaagcggttagctccttcggtcctccgatcgttgtcagaagtaagttggccgcagtgttatcactcatggttatggcagcactgcataattctcttactgtcatgccatccgtaagatgcttttctgtgactggtgagtactcaaccaagtcattctgagaatagtgtatgcggcgaccgagttgctcttgcccggcgtcaatacgggataataccgcgccacatagcagaactttaaaagtgctcatcattggaaaacgttcttcggggcgaaaactctcaaggatcttaccgctgttgagatccagttcgatgtaacccactcgtgcacccaactgatcttcagcatcttttactttcaccagcgtttctgggtgagcaaaaacaggaaggcaaaatgccgcaaaaaagggaataagggcgacacggaaatgttgaatactcatactcttcctttttcaatattattgaagcatttatcagggttattgtctcatgagcggatacatatttgaatgtatttagaaaaataaacaaataggggttccgcgcacatttccccgaaaagtgccacctgacgtc

SEQ ID NO: 150 - DNA, 7515 bp, Artificial Sequence
  Synthetic
gacggatcgggagatctcccgatcccctatggtgcactctcagtacaatctgctctgatgccgcatagttaagccagtatctgctccctgcttgtgtgttggaggtcgctgagtagtgcgcgagcaaaatttaagctacaacaaggcaaggcttgaccgacaattgcatgaagaatctgcttagggttaggcgttttgcgctgcttcgcgatgtacgggccagatatacgcgttgacattgattattgactagttattaatagtaatcaattacggggtcattagttcatagcccatatatggagttccgcgttacataacttacggtaaatggcccgcctggctgaccgcccaacgacccccgcccattgacgtcaataatgacgtatgttcccatagtaacgccaatagggactttccattgacgtcaatgggtggagtatttacggtaaactgcccacttggcagtacatcaagtgtatcatatgccaagtacgccccctattgacgtcaatgacggtaaatggcccgcctggcattatgcccagtacatgaccttatgggactttcctacttggcagtacatctacgtattagtcatcgctattaccatggtgatgcggttttggcagtacatcaatgggcgtggatagcggtttgactcacggggatttccaagtctccaccccattgacgtcaatgggagtttgttttggcaccaaaatcaacgggactttccaaaatgtcgtaacaactccgccccattgacgcaaatgggcggtaggcgtgtacggtgggaggtctatataagcagagctctctggctaactagagaacccactgcttactggcttatcgaaattaatacgactcactatagggagacccaagctggctagcgtttaaacttaagcttggtaccgccaccatgccccctgactccaactctatcttcggcttctttgatgagtttgaggcctccgaggaggagtctcagctgctgcccaaggagctgatcctggagcctgtggagatcagctccacaatcgacagcctgccagccaagatccaggaggaggtgctgcggcggatcaaagtgatcaccttcgtggagaagagactgaagggcggctggacagagaagaacctgaatcccatcctgagcctggtggagtccgagctgcagctgaccccaccatcctggaggaccgtggccacatggaagaagtcttacgcagaggcaggaagagaggccagcgccctgatcccaaagcacaccttcaagggcaaccggcagaaggagatggacagccagtccctgatcgatgaggccatccagaacgtgtacctgaccagggagcgcctgtccgtggcagaggcctatcggtactataagagcagagtgatccagatgaatagaggcatcgtggagggcaagatcaagcctatcgccgagaggagcttctacaaccgcatcaatgagctgcctccatatgaggtggccatcgccaggtttggcaagcggtacgccgaccgggagtatagatccgtgggacagcaggtggtggcaaccaagccaatggagttcgtggagatcgatcacacacccgtgcctgtgatcctgatcgacgatgagctggacatccctctgggcaggccatacctgacaatgctgtatgatcgcttttccaagtgcatcgtgggctgttctatcaacttccgggagccttcctttgactctgtgagaaaggccctgctgaattctctgctggataagagctggctgaaggccaagtacccaagcatcgagaacgagtggccctgccacggcaagatcgactgtctggtggtggataatggcgccgagttctggtctcagagcctggaggacagcctgaggcctctggtgtccgatatccagtattctcaggcagcaaagccctggaggaagtccggcatcgagaagctgttcgaccagatgaacaagggcctggtgaatgccctgcctggcaagacctttacaaacccaacccagctgcaggactacaatcccaagaaggatgccgtggtgcgggtgagcgtgttcctggagctgctgcacaagtggatcgtggactactatcacatggccccagatagccgggagagagagatcccctatcacaagtggcaccagagcaagtggacaccttcctactatgatggcgccgagaaggagcagctgagggtggagctgggactgctgaggcacaggaccatcggcgtggcaggcatccggctgcacaacctgagataccagagcgccgagctgatcgagtaccgcaagtattgcacacccaacaatggcaagcagctgttcgtgaagaccaagacagaccctagcgatatctcctacatccacgtgtatctggagtccgagaagaagtacatcaaggtgcccgccgtggacaacagcggctataccaatggcctgtccctgtttgagcaccagcgcatccagaaggtgaggcgcctgaacaccaaggacctggcagacgatgaggccctggccgatacattcctgtatatgaagaagagaatccacgaggagaccgaccgctttcggagagtgaagtctagcaagccaaacctgcccaagaccggcaatacatcccggctggccaagttcaatgatgtgggctctgagggccccaacagcatcaatgtgacccctgtgagactgaagtctgaggtggtgtctgacgccagcgagtacctggacgatgacgattttgaggatatcgagggctatggctccggaaaacggacagccgacggaagcgagttcgagtcaccgaaaaagaagcgaaaagttggtggtagtggtggaagcggcgaggccagcggttccggacgggctgacgcattggacgattttgatctggatatgctgggaagtgacgccctcgatgattttgaccttgacatgcttggttcggatgcccttgatgactttgacctcgacatgctcggcagtgacgcccttgatgatttcgacctggacatgctgattaactctagatgagcggccgctcgagtctagagggcccgtttaaacccgctgatcagcctcgactgtgccttctagttgccagccatctgttgtttgcccctcccccgtgccttccttgaccctggaaggtgccactcccactgtcctttcctaataaaatgaggaaattgcatcgcattgtctgagtaggtgtcattctattctggggggtggggtggggcaggacagcaagggggaggattgggaagacaatagcaggcatgctggggatgcggtgggctctatggcttctgaggcggaaagaaccagctggggctctagggggtatccccacgcgccctgtagcggcgcattaagcgcggcgggtgtggtggttacgcgcagcgtgaccgctacacttgccagcgccctagcgcccgctcctttcgctttcttcccttcctttctcgccacgttcgccggctttccccgtcaagctctaaatcgggggctccctttagggttccgatttagtgctttacggcacctcgaccccaaaaaacttgattagggtgatggttcacgtagtgggccatcgccctgatagacggtttttcgccctttgacgttggagtccacgttctttaatagtggactcttgttccaaactggaacaacactcaaccctatctcggtctattcttttgatttataagggattttgccgatttcggcctattggttaaaaaatgagctgatttaacaaaaatttaacgcgaattaattctgtggaatgtgtgtcagttagggtgtggaaagtccccaggctccccagcaggcagaagtatgcaaagcatgcatctcaattagtcagcaaccaggtgtggaaagtccccaggctccccagcaggcagaagtatgcaaagcatgcatctcaattagtcagcaaccatagtcccgcccctaactccgcccatcccgcccctaactccgcccagttccgcccattctccgccccatggctgactaattttttttatttatgcagaggccgaggccgcctctgcctctgagctattccagaagtagtgaggaggcttttttggaggcctaggcttttgcaaaaagctcccgggagcttgtatatccattttcggatctgatcaagagacaggatgaggatcgtttcgcatgattgaacaagatggattgcacgcaggttctccggccgcttgggtggagaggctattcggctatgactgggcacaacagacaatcggctgctctgatgccgccgtgttccggctgtcagcgcaggggcgcccggttctttttgtcaagaccgacctgtccggtgccctgaatgaactgcaggacgaggcagcgcggctatcgtggctggccacgacgggcgttccttgcgcagctgtgctcgacgttgtcactgaagcgggaagggactggctgctattgggcgaagtgccggggcaggatctcctgtcatctcaccttgctcctgccgagaaagtatccatcatggctgatgcaatgcggcggctgcatacgcttgatccggctacctgcccattcgaccaccaagcgaaacatcgcatcgagcgagcacgtactcggatggaagccggtcttgtcgatcaggatgatctggacgaagagcatcaggggctcgcgccagccgaactgttcgccaggctcaaggcgcgcatgcccgacggcgaggatctcgtcgtgacccatggcgatgcctgcttgccgaatatcatggtggaaaatggccgcttttctggattcatcgactgtggccggctgggtgtggcggaccgctatcaggacatagcgttggctacccgtgatattgctgaagagcttggcggcgaatgggctgaccgcttcctcgtgctttacggtatcgccgctcccgattcgcagcgcatcgccttctatcgccttcttgacgagttcttctgagcgggactctggggttcgaaatgaccgaccaagcgacgcccaacctgccatcacgagatttcgattccaccgccgccttctatgaaaggttgggcttcggaatcgttttccgggacgccggctggatgatcctccagcgcggggatctcatgctggagttcttcgcccaccccaacttgtttattgcagcttataatggttacaaataaagcaatagcatcacaaatttcacaaataaagcatttttttcactgcattctagttgtggtttgtccaaactcatcaatgtatcttatcatgtctgtataccgtcgacctctagctagagcttggcgtaatcatggtcatagctgtttcctgtgtgaaattgttatccgctcacaattccacacaacatacgagccggaagcataaagtgtaaagcctggggtgcctaatgagtgagctaactcacattaattgcgttgcgctcactgcccgctttccagtcgggaaacctgtcgtgccagctgcattaatgaatcggccaacgcgcggggagaggcggtttgcgtattgggcgctcttccgcttcctcgctcactgactcgctgcgctcggtcgttcggctgcggcgagcggtatcagctcactcaaaggcggtaatacggttatccacagaatcaggggataacgcaggaaagaacatgtgagcaaaaggccagcaaaaggccaggaaccgtaaaaaggccgcgttgctggcgtttttccataggctccgcccccctgacgagcatcacaaaaatcgacgctcaagtcagaggtggcgaaacccgacaggactataaagataccaggcgtttccccctggaagctccctcgtgcgctctcctgttccgaccctgccgcttaccggatacctgtccgcctttctcccttcgggaagcgtggcgctttctcatagctcacgctgtaggtatctcagttcggtgtaggtcgttcgctccaagctgggctgtgtgcacgaaccccccgttcagcccgaccgctgcgccttatccggtaactatcgtcttgagtccaacccggtaagacacgacttatcgccactggcagcagccactggtaacaggattagcagagcgaggtatgtaggcggtgctacagagttcttgaagtggtggcctaactacggctacactagaagaacagtatttggtatctgcgctctgctgaagccagttaccttcggaaaaagagttggtagctcttgatccggcaaacaaaccaccgctggtagcggtttttttgtttgcaagcagcagattacgcgcagaaaaaaaggatctcaagaagatcctttgatcttttctacggggtctgacgctcagtggaacgaaaactcacgttaagggattttggtcatgagattatcaaaaaggatcttcacctagatccttttaaattaaaaatgaagttttaaatcaatctaaagtatatatgagtaaacttggtctgacagttaccaatgcttaatcagtgaggcacctatctcagcgatctgtctatttcgttcatccatagttgcctgactccccgtcgtgtagataactacgatacgggagggcttaccatctggccccagtgctgcaatgataccgcgagacccacgctcaccggctccagatttatcagcaataaaccagccagccggaagggccgagcgcagaagtggtcctgcaactttatccgcctccatccagtctattaattgttgccgggaagctagagtaagtagttcgccagttaatagtttgcgcaacgttgttgccattgctacaggcatcgtggtgtcacgctcgtcgtttggtatggcttcattcagctccggttcccaacgatcaaggcgagttacatgatcccccatgttgtgcaaaaaagcggttagctccttcggtcctccgatcgttgtcagaagtaagttggccgcagtgttatcactcatggttatggcagcactgcataattctcttactgtcatgccatccgtaagatgcttttctgtgactggtgagtactcaaccaagtcattctgagaatagtgtatgcggcgaccgagttgctcttgcccggcgtcaatacgggataataccgcgccacatagcagaactttaaaagtgctcatcattggaaaacgttcttcggggcgaaaactctcaaggatcttaccgctgttgagatccagttcgatgtaacccactcgtgcacccaactgatcttcagcatcttttactttcaccagcgtttctgggtgagcaaaaacaggaaggcaaaatgccgcaaaaaagggaataagggcgacacggaaatgttgaatactcatactcttcctttttcaatattattgaagcatttatcagggttattgtctcatgagcggatacatatttgaatgtatttagaaaaataaacaaataggggttccgcgcacatttccccgaaaagtgccacctgacgtc

SEQ ID NO: 151 - DNA, 7515 bp, Artificial Sequence
  Synthetic
gacggatcgggagatctcccgatcccctatggtgcactctcagtacaatctgctctgatgccgcatagttaagccagtatctgctccctgcttgtgtgttggaggtcgctgagtagtgcgcgagcaaaatttaagctacaacaaggcaaggcttgaccgacaattgcatgaagaatctgcttagggttaggcgttttgcgctgcttcgcgatgtacgggccagatatacgcgttgacattgattattgactagttattaatagtaatcaattacggggtcattagttcatagcccatatatggagttccgcgttacataacttacggtaaatggcccgcctggctgaccgcccaacgacccccgcccattgacgtcaataatgacgtatgttcccatagtaacgccaatagggactttccattgacgtcaatgggtggagtatttacggtaaactgcccacttggcagtacatcaagtgtatcatatgccaagtacgccccctattgacgtcaatgacggtaaatggcccgcctggcattatgcccagtacatgaccttatgggactttcctacttggcagtacatctacgtattagtcatcgctattaccatggtgatgcggttttggcagtacatcaatgggcgtggatagcggtttgactcacggggatttccaagtctccaccccattgacgtcaatgggagtttgttttggcaccaaaatcaacgggactttccaaaatgtcgtaacaactccgccccattgacgcaaatgggcggtaggcgtgtacggtgggaggtctatataagcagagctctctggctaactagagaacccactgcttactggcttatcgaaattaatacgactcactatagggagacccaagctggctagcgtttaaacttaagcttggtaccgccaccatgagcaatgatgccctgttcggctttcgggacgagagctcctctttcgataacgacgtggccgacgataagaccctgcccacagagttcctggccgaggatgagaatctggagctggcctttggcgacctgcctcacaaggagacagccctgtaccggctggatctgatcaggtatctggagaggcacgtgcagggaggatggaccccaaagaacctggacaagctgctggaggagtacgccctgctgaagaagacctccgtgcccagctccagaacagtggccgattggaagaagctgtactatgagtccggcaaggacgtggcctctctggtgcccggacacagcaagaagggcaacagaatcctgaagaatgattctagcgacctggtgaccgaggccatccagaccaagtttctgacaaaggagcgcgtgtccgtgaatacagcctacgagtactataagtatagagtgatcgaggagaaccgccagctgacccagatcaagatcgccaccatctctcagaggacattctacaaccgcgtgaatgccctgccaccttatgaggtggccctggcccggtacggcaagagatatgccgataataagtttaagaccgtgggcagcatcatccctgccacaagaccaatggagtgcgtggagatcgaccacaccacagcccccgtgatcctgctggacgatgacctggatctgccactgggccggcctcacctgaccatcctgtacgacagatattccacatgtatcgtgggcctgtctgtgaattaccgggaccccagctatgagaccgtgcgcgccgccttcctgaactctgtgctgaagaaggactgggtgaaggagaagtacccatccatcaagtctgagtggccctgctatggcaacatcacaaatctgatcgtggataatggcgccgagttttggtctgacagcctggagtccgccctgaagcccctggtgaccgatatccagtacaaccagcggggcaagccttggagaaaggccggcgtggagaagtctttcgacaccttctacaagaagctgttcagccggtttcctggcaagaccttcacaaacccaacccagctgaaggattacaatccaaagcgggacgccgtgatcaacgtgagcgactttctggagctgctgcacaagtggctgatcgacgtgtaccacaagaaggccgacaccaggtacaagcgcgtgccttatcagaagtggacagagtcccagggcaagatcatcttctgtgagggcccagaggccgagcagctgaagatcgagctgggcgtggtgaaccacaggaccatccggcggggagccatcgagctgcactccctgaagtaccagtctgatgagctggaggagtacggcaagcagtattcctctcgggccagaaagagcgcctatgtgaagaccaagacagatcctaatgacatcagctccatctacgtgtatctggaggaggagaagaagtacatcaaggtgccagccgtggaccacaccggctacacaaagggccggtccctgtatgagcaccagagaatcaactctctgaggcgcctgaaggtgaggctgggagagcaggatgagagcctggccgacgcctccctgtacctggatagggctatggacgaggccatcgagcggatgagccggagcaagagcaagaagagcgccctgcctaagaccacacacgcctccaagatcgcaaagcagaggggagtgggcagcgagggcccatccaccatcgtgatcacatctccaaagcccatcagcgaggtgcccaaggaagtgatcgatatcggcaccgcctctgatgacctgagcgacatcgagggctacggctccggaaaacggacagccgacggaagcgagttcgagtcaccgaaaaagaagcgaaaagttggtggtagtggtggaagcggcgaggccagcggttccggacgggctgacgcattggacgattttgatctggatatgctgggaagtgacgccctcgatgattttgaccttgacatgcttggttcggatgcccttgatgactttgacctcgacatgctcggcagtgacgcccttgatgatttcgacctggacatgctgattaactctagatgagcggccgctcgagtctagagggcccgtttaaacccgctgatcagcctcgactgtgccttctagttgccagccatctgttgtttgcccctcccccgtgccttccttgaccctggaaggtgccactcccactgtcctttcctaataaaatgaggaaattgcatcgcattgtctgagtaggtgtcattctattctggggggtggggtggggcaggacagcaagggggaggattgggaagacaatagcaggcatgctggggatgcggtgggctctatggcttctgaggcggaaagaaccagctggggctctagggggtatccccacgcgccctgtagcggcgcattaagcgcggcgggtgtggtggttacgcgcagcgtgaccgctacacttgccagcgccctagcgcccgctcctttcgctttcttcccttcctttctcgccacgttcgccggctttccccgtcaagctctaaatcgggggctccctttagggttccgatttagtgctttacggcacctcgaccccaaaaaacttgattagggtgatggttcacgtagtgggccatcgccctgatagacggtttttcgccctttgacgttggagtccacgttctttaatagtggactcttgttccaaactggaacaacactcaaccctatctcggtctattcttttgatttataagggattttgccgatttcggcctattggttaaaaaatgagctgatttaacaaaaatttaacgcgaattaattctgtggaatgtgtgtcagttagggtgtggaaagtccccaggctccccagcaggcagaagtatgcaaagcatgcatctcaattagtcagcaaccaggtgtggaaagtccccaggctccccagcaggcagaagtatgcaaagcatgcatctcaattagtcagcaaccatagtcccgcccctaactccgcccatcccgcccctaactccgcccagttccgcccattctccgccccatggctgactaattttttttatttatgcagaggccgaggccgcctctgcctctgagctattccagaagtagtgaggaggcttttttggaggcctaggcttttgcaaaaagctcccgggagcttgtatatccattttcggatctgatcaagagacaggatgaggatcgtttcgcatgattgaacaagatggattgcacgcaggttctccggccgcttgggtggagaggctattcggctatgactgggcacaacagacaatcggctgctctgatgccgccgtgttccggctgtcagcgcaggggcgcccggttctttttgtcaagaccgacctgtccggtgccctgaatgaactgcaggacgaggcagcgcggctatcgtggctggccacgacgggcgttccttgcgcagctgtgctcgacgttgtcactgaagcgggaagggactggctgctattgggcgaagtgccggggcaggatctcctgtcatctcaccttgctcctgccgagaaagtatccatcatggctgatgcaatgcggcggctgcatacgcttgatccggctacctgcccattcgaccaccaagcgaaacatcgcatcgagcgagcacgtactcggatggaagccggtcttgtcgatcaggatgatctggacgaagagcatcaggggctcgcgccagccgaactgttcgccaggctcaaggcgcgcatgcccgacggcgaggatctcgtcgtgacccatggcgatgcctgcttgccgaatatcatggtggaaaatggccgcttttctggattcatcgactgtggccggctgggtgtggcggaccgctatcaggacatagcgttggctacccgtgatattgctgaagagcttggcggcgaatgggctgaccgcttcctcgtgctttacggtatcgccgctcccgattcgcagcgcatcgccttctatcgccttcttgacgagttcttctgagcgggactctggggttcgaaatgaccgaccaagcgacgcccaacctgccatcacgagatttcgattccaccgccgccttctatgaaaggttgggcttcggaatcgttttccgggacgccggctggatgatcctccagcgcggggatctcatgctggagttcttcgcccaccccaacttgtttattgcagcttataatggttacaaataaagcaatagcatcacaaatttcacaaataaagcatttttttcactgcattctagttgtggtttgtccaaactcatcaatgtatcttatcatgtctgtataccgtcgacctctagctagagcttggcgtaatcatggtcatagctgtttcctgtgtgaaattgttatccgctcacaattccacacaacatacgagccggaagcataaagtgtaaagcctggggtgcctaatgagtgagctaactcacattaattgcgttgcgctcactgcccgctttccagtcgggaaacctgtcgtgccagctgcattaatgaatcggccaacgcgcggggagaggcggtttgcgtattgggcgctcttccgcttcctcgctcactgactcgctgcgctcggtcgttcggctgcggcgagcggtatcagctcactcaaaggcggtaatacggttatccacagaatcaggggataacgcaggaaagaacatgtgagcaaaaggccagcaaaaggccaggaaccgtaaaaaggccgcgttgctggcgtttttccataggctccgcccccctgacgagcatcacaaaaatcgacgctcaagtcagaggtggcgaaacccgacaggactataaagataccaggcgtttccccctggaagctccctcgtgcgctctcctgttccgaccctgccgcttaccggatacctgtccgcctttctcccttcgggaagcgtggcgctttctcatagctcacgctgtaggtatctcagttcggtgtaggtcgttcgctccaagctgggctgtgtgcacgaaccccccgttcagcccgaccgctgcgccttatccggtaactatcgtcttgagtccaacccggtaagacacgacttatcgccactggcagcagccactggtaacaggattagcagagcgaggtatgtaggcggtgctacagagttcttgaagtggtggcctaactacggctacactagaagaacagtatttggtatctgcgctctgctgaagccagttaccttcggaaaaagagttggtagctcttgatccggcaaacaaaccaccgctggtagcggtttttttgtttgcaagcagcagattacgcgcagaaaaaaaggatctcaagaagatcctttgatcttttctacggggtctgacgctcagtggaacgaaaactcacgttaagggattttggtcatgagattatcaaaaaggatcttcacctagatccttttaaattaaaaatgaagttttaaatcaatctaaagtatatatgagtaaacttggtctgacagttaccaatgcttaatcagtgaggcacctatctcagcgatctgtctatttcgttcatccatagttgcctgactccccgtcgtgtagataactacgatacgggagggcttaccatctggccccagtgctgcaatgataccgcgagacccacgctcaccggctccagatttatcagcaataaaccagccagccggaagggccgagcgcagaagtggtcctgcaactttatccgcctccatccagtctattaattgttgccgggaagctagagtaagtagttcgccagttaatagtttgcgcaacgttgttgccattgctacaggcatcgtggtgtcacgctcgtcgtttggtatggcttcattcagctccggttcccaacgatcaaggcgagttacatgatcccccatgttgtgcaaaaaagcggttagctccttcggtcctccgatcgttgtcagaagtaagttggccgcagtgttatcactcatggttatggcagcactgcataattctcttactgtcatgccatccgtaagatgcttttctgtgactggtgagtactcaaccaagtcattctgagaatagtgtatgcggcgaccgagttgctcttgcccggcgtcaatacgggataataccgcgccacatagcagaactttaaaagtgctcatcattggaaaacgttcttcggggcgaaaactctcaaggatcttaccgctgttgagatccagttcgatgtaacccactcgtgcacccaactgatcttcagcatcttttactttcaccagcgtttctgggtgagcaaaaacaggaaggcaaaatgccgcaaaaaagggaataagggcgacacggaaatgttgaatactcatactcttcctttttcaatattattgaagcatttatcagggttattgtctcatgagcggatacatatttgaatgtatttagaaaaataaacaaataggggttccgcgcacatttccccgaaaagtgccacctgacgtc

SEQ ID NO: 152 - DNA, 7491 bp, Artificial Sequence
  Synthetic
gacggatcgggagatctcccgatcccctatggtgcactctcagtacaatctgctctgatgccgcatagttaagccagtatctgctccctgcttgtgtgttggaggtcgctgagtagtgcgcgagcaaaatttaagctacaacaaggcaaggcttgaccgacaattgcatgaagaatctgcttagggttaggcgttttgcgctgcttcgcgatgtacgggccagatatacgcgttgacattgattattgactagttattaatagtaatcaattacggggtcattagttcatagcccatatatggagttccgcgttacataacttacggtaaatggcccgcctggctgaccgcccaacgacccccgcccattgacgtcaataatgacgtatgttcccatagtaacgccaatagggactttccattgacgtcaatgggtggagtatttacggtaaactgcccacttggcagtacatcaagtgtatcatatgccaagtacgccccctattgacgtcaatgacggtaaatggcccgcctggcattatgcccagtacatgaccttatgggactttcctacttggcagtacatctacgtattagtcatcgctattaccatggtgatgcggttttggcagtacatcaatgggcgtggatagcggtttgactcacggggatttccaagtctccaccccattgacgtcaatgggagtttgttttggcaccaaaatcaacgggactttccaaaatgtcgtaacaactccgccccattgacgcaaatgggcggtaggcgtgtacggtgggaggtctatataagcagagctctctggctaactagagaacccactgcttactggcttatcgaaattaatacgactcactatagggagacccaagctggctagcgtttaaacttaagcttggtaccgccaccatgaccgatttctttaacgagttcgacgagagcctggtgcccctgaagcctcagaccccaacacagtacgtgaagctggacgatgccaacctgatccagcgggatctggacaccttctccgataccttcaagaatcaggccctgcagagatataagctgatctccaccatcgacaagaagctgtctaggggctggacacagcgcaacctggaccccatcctggacgagctgttcaagggcggcgacgtggtgaggcctaattggcgcacagtggcccggtggagaaagaagtacatcgagtctaacggcgatatcgccagcctggccgacaagaatcacaagatgggcaacaggaccaatcgcatcaagggcgacgataagttctttgataaggccctggagcggttcctggacgccaagagacctacaatcgccaccgcctatcagtactataaggatctgatcgtgatcgagaacgagtccatcgtggagggcaagatcccaatcatctcttacaacgcctttaataagaggatcaaggccatcccaccttatgcagtggcagtggcacgccacggcaagttcaaggccgaccagtggtttgcatactgcgcagcacacgtgccaccaaccagaatcctggagcgggtggagatcgatcacacacccctggacctgatcctgctggacgatgagctgctgatcccaatcggcaggccctatctgacactgctgatcgacgtgttcagcggctgcgtgctgggctttcacctgagctacaagagcccttcctacgtgagcgccgcaaaggcaatcacccacgccatcaagccaaagtccctggatgccctgaacatcgagctgcagaatgactggccctgcttcggcaagtttgagaacctggtggtggacaatggcgccgagttctggtctaagaacctggagcacgcctgtcagagcgccggcatcaacatccagtacaatcctgtgaggaagccctggctgaagccctttatcgagcggttcttcggcgtgatgaacgagtacttcctgcccgagctgcctggcaagaccttttctaatatcctggagaaggaggagtataagcccgagaaggacgccatcatgcggttcagcacatttgtggaggagttccacagatggatcgccgacgtgtaccaccaggactctaatagccgggagaccagaatccctatcaagaggtggcagcagggcttcgatgcctatcctccactgaccatgaacgaggaggaggagacaaggttttccatgctgatgcgcatctccgactctaggaccctgacacgcaatggctttaagtaccaggagctgatgtatgattctaccgccctggccgactaccgcaagcactatccacagacaaaggagaccgtgaagaagctgatcaaggtggaccccgacgatatcagcaaaatctacgtgtacctggaggagctggagtcctacctggaggtgccttgcacagatccaaccggctacacagacggcctgagcatctatgagcacaagaccatcaagaagatcaaccgggaagtgatcagagagagcaaggactccctgggcctggccaaggcaaggatggccatccacgagagagtgaagcaggagcaggaggtgttcatcgagtccaagaccaaggccaagatcacagccgtgaagaagcaggcccagatcgccgatgtgagcaataccggcacatccaccatcaaggtgtctgaggagagcgccgcaccagtgcagaagcacatctccaacgacaattctgacgattgggacgatgacctggaggcctttgagggctccggaaaacggacagccgacggaagcgagttcgagtcaccgaaaaagaagcgaaaagttggtggtagtggtggaagcggcgaggccagcggttccggacgggctgacgcattggacgattttgatctggatatgctgggaagtgacgccctcgatgattttgaccttgacatgcttggttcggatgcccttgatgactttgacctcgacatgctcggcagtgacgcccttgatgatttcgacctggacatgctgattaactctagatgagcggccgctcgagtctagagggcccgtttaaacccgctgatcagcctcgactgtgccttctagttgccagccatctgttgtttgcccctcccccgtgccttccttgaccctggaaggtgccactcccactgtcctttcctaataaaatgaggaaattgcatcgcattgtctgagtaggtgtcattctattctggggggtggggtggggcaggacagcaagggggaggattgggaagacaatagcaggcatgctggggatgcggtgggctctatggcttctgaggcggaaagaaccagctggggctctagggggtatccccacgcgccctgtagcggcgcattaagcgcggcgggtgtggtggttacgcgcagcgtgaccgctacacttgccagcgccctagcgcccgctcctttcgctttcttcccttcctttctcgccacgttcgccggctttccccgtcaagctctaaatcgggggctccctttagggttccgatttagtgctttacggcacctcgaccccaaaaaacttgattagggtgatggttcacgtagtgggccatcgccctgatagacggtttttcgccctttgacgttggagtccacgttctttaatagtggactcttgttccaaactggaacaacactcaaccctatctcggtctattcttttgatttataagggattttgccgatttcggcctattggttaaaaaatgagctgatttaacaaaaatttaacgcgaattaattctgtggaatgtgtgtcagttagggtgtggaaagtccccaggctccccagcaggcagaagtatgcaaagcatgcatctcaattagtcagcaaccaggtgtggaaagtccccaggctccccagcaggcagaagtatgcaaagcatgcatctcaattagtcagcaaccatagtcccgcccctaactccgcccatcccgcccctaactccgcccagttccgcccattctccgccccatggctgactaattttttttatttatgcagaggccgaggccgcctctgcctctgagctattccagaagtagtgaggaggcttttttggaggcctaggcttttgcaaaaagctcccgggagcttgtatatccattttcggatctgatcaagagacaggatgaggatcgtttcgcatgattgaacaagatggattgcacgcaggttctccggccgcttgggtggagaggctattcggctatgactgggcacaacagacaatcggctgctctgatgccgccgtgttccggctgtcagcgcaggggcgcccggttctttttgtcaagaccgacctgtccggtgccctgaatgaactgcaggacgaggcagcgcggctatcgtggctggccacgacgggcgttccttgcgcagctgtgctcgacgttgtcactgaagcgggaagggactggctgctattgggcgaagtgccggggcaggatctcctgtcatctcaccttgctcctgccgagaaagtatccatcatggctgatgcaatgcggcggctgcatacgcttgatccggctacctgcccattcgaccaccaagcgaaacatcgcatcgagcgagcacgtactcggatggaagccggtcttgtcgatcaggatgatctggacgaagagcatcaggggctcgcgccagccgaactgttcgccaggctcaaggcgcgcatgcccgacggcgaggatctcgtcgtgacccatggcgatgcctgcttgccgaatatcatggtggaaaatggccgcttttctggattcatcgactgtggccggctgggtgtggcggaccgctatcaggacatagcgttggctacccgtgatattgctgaagagcttggcggcgaatgggctgaccgcttcctcgtgctttacggtatcgccgctcccgattcgcagcgcatcgccttctatcgccttcttgacgagttcttctgagcgggactctggggttcgaaatgaccgaccaagcgacgcccaacctgccatcacgagatttcgattccaccgccgccttctatgaaaggttgggcttcggaatcgttttccgggacgccggctggatgatcctccagcgcggggatctcatgctggagttcttcgcccaccccaacttgtttattgcagcttataatggttacaaataaagcaatagcatcacaaatttcacaaataaagcatttttttcactgcattctagttgtggtttgtccaaactcatcaatgtatcttatcatgtctgtataccgtcgacctctagctagagcttggcgtaatcatggtcatagctgtttcctgtgtgaaattgttatccgctcacaattccacacaacatacgagccggaagcataaagtgtaaagcctggggtgcctaatgagtgagctaactcacattaattgcgttgcgctcactgcccgctttccagtcgggaaacctgtcgtgccagctgcattaatgaatcggccaacgcgcggggagaggcggtttgcgtattgggcgctcttccgcttcctcgctcactgactcgctgcgctcggtcgttcggctgcggcgagcggtatcagctcactcaaaggcggtaatacggttatccacagaatcaggggataacgcaggaaagaacatgtgagcaaaaggccagcaaaaggccaggaaccgtaaaaaggccgcgttgctggcgtttttccataggctccgcccccctgacgagcatcacaaaaatcgacgctcaagtcagaggtggcgaaacccgacaggactataaagataccaggcgtttccccctggaagctccctcgtgcgctctcctgttccgaccctgccgcttaccggatacctgtccgcctttctcccttcgggaagcgtggcgctttctcatagctcacgctgtaggtatctcagttcggtgtaggtcgttcgctccaagctgggctgtgtgcacgaaccccccgttcagcccgaccgctgcgccttatccggtaactatcgtcttgagtccaacccggtaagacacgacttatcgccactggcagcagccactggtaacaggattagcagagcgaggtatgtaggcggtgctacagagttcttgaagtggtggcctaactacggctacactagaagaacagtatttggtatctgcgctctgctgaagccagttaccttcggaaaaagagttggtagctcttgatccggcaaacaaaccaccgctggtagcggtttttttgtttgcaagcagcagattacgcgcagaaaaaaaggatctcaagaagatcctttgatcttttctacggggtctgacgctcagtggaacgaaaactcacgttaagggattttggtcatgagattatcaaaaaggatcttcacctagatccttttaaattaaaaatgaagttttaaatcaatctaaagtatatatgagtaaacttggtctgacagttaccaatgcttaatcagtgaggcacctatctcagcgatctgtctatttcgttcatccatagttgcctgactccccgtcgtgtagataactacgatacgggagggcttaccatctggccccagtgctgcaatgataccgcgagacccacgctcaccggctccagatttatcagcaataaaccagccagccggaagggccgagcgcagaagtggtcctgcaactttatccgcctccatccagtctattaattgttgccgggaagctagagtaagtagttcgccagttaatagtttgcgcaacgttgttgccattgctacaggcatcgtggtgtcacgctcgtcgtttggtatggcttcattcagctccggttcccaacgatcaaggcgagttacatgatcccccatgttgtgcaaaaaagcggttagctccttcggtcctccgatcgttgtcagaagtaagttggccgcagtgttatcactcatggttatggcagcactgcataattctcttactgtcatgccatccgtaagatgcttttctgtgactggtgagtactcaaccaagtcattctgagaatagtgtatgcggcgaccgagttgctcttgcccggcgtcaatacgggataataccgcgccacatagcagaactttaaaagtgctcatcattggaaaacgttcttcggggcgaaaactctcaaggatcttaccgctgttgagatccagttcgatgtaacccactcgtgcacccaactgatcttcagcatcttttactttcaccagcgtttctgggtgagcaaaaacaggaaggcaaaatgccgcaaaaaagggaataagggcgacacggaaatgttgaatactcatactcttcctttttcaatattattgaagcatttatcagggttattgtctcatgagcggatacatatttgaatgtatttagaaaaataaacaaataggggttccgcgcacatttccccgaaaagtgccacctgacgtc

SEQ ID NO: 153 - DNA, 7524 bp, Artificial Sequence
  Synthetic
gacggatcgggagatctcccgatcccctatggtgcactctcagtacaatctgctctgatgccgcatagttaagccagtatctgctccctgcttgtgtgttggaggtcgctgagtagtgcgcgagcaaaatttaagctacaacaaggcaaggcttgaccgacaattgcatgaagaatctgcttagggttaggcgttttgcgctgcttcgcgatgtacgggccagatatacgcgttgacattgattattgactagttattaatagtaatcaattacggggtcattagttcatagcccatatatggagttccgcgttacataacttacggtaaatggcccgcctggctgaccgcccaacgacccccgcccattgacgtcaataatgacgtatgttcccatagtaacgccaatagggactttccattgacgtcaatgggtggagtatttacggtaaactgcccacttggcagtacatcaagtgtatcatatgccaagtacgccccctattgacgtcaatgacggtaaatggcccgcctggcattatgcccagtacatgaccttatgggactttcctacttggcagtacatctacgtattagtcatcgctattaccatggtgatgcggttttggcagtacatcaatgggcgtggatagcggtttgactcacggggatttccaagtctccaccccattgacgtcaatgggagtttgttttggcaccaaaatcaacgggactttccaaaatgtcgtaacaactccgccccattgacgcaaatgggcggtaggcgtgtacggtgggaggtctatataagcagagctctctggctaactagagaacccactgcttactggcttatcgaaattaatacgactcactatagggagacccaagctggctagcgtttaaacttaagcttggtaccgccaccatgtccgacgattctgagaacctgtatgccttcggctctttctttcccgagaagcacagcaatacatccgtgcctaagaccagcaagggcacaagatttggcatcgagctgcaggagtcttaccaggacctgttcagctttgatgagaagcggcgggacgaggccatccacaggtataacatcctggattacctgatcgagctgcacggccccagcctgaccctgaagaagatcagcggcagcatgaagggcctggccgacaagttccaccctaatgtgccatctgcccccagcatctaccgctattggaccacattcaagaagtccggctttgtgctgagctccctgatcccaggagtgacccgcggcaacacaaagcagcggaagaccctggagctggaggagtatatcgagcgcgccatcaagtcctacttctctgccgagagccccacaatccagcaggcctttaccctgctggagacagagatcgatcggcacaacgagtgcaatgacacccagctgagcttcgagtatgagtcctttaggaagcgcatcgtgaagaagaccgattacgagcggctgctgatcaagaagggcaagaaggccgccgacacatactataagaaagtgggccagagacccgagaccacacgggtgctgcagagagtggaggccgatcacacaaggctggacctgttcgtgatcgacgatgcaagaaagctgcctctgggccggccctggctgaccctgctgtttgatacccacacaaagagcgtggtgggcttctatctgggctttgagccccctggctacctgtccgtgtctctggccctggagaatgccatcctgccaaagtactatgtgaaggagctgtatcccgaggtgaagggagagtggccatgctacggactgcccgagcacctgatcgtggataacggcgccgagttcaattccaaggactttgtgacagcctgtaagaacctgagaatcaaggtgaagaagaatcccgtgaagaagccttggctgaagggcagcgtggagaggtacttccgcaccatcaacaataagctgctgtccggcatccctggcaagagcttctccaatatctttgccagaggcgattataacccacagaagaatgccatcatcacaaggagcgatctgatgaaagtgatccacgtgtggctgatcgacatctaccagtctagccctaacggcctggagaacaatatcccaaatctgtcctgggcagacgcaatgcgctctgccttcccaccacggtcctttaacggctctatcgatgagctgcgcttcaatctgggcaagcacgtggagatcagcctggacaggaacggcatccgcctgaagaagaccctgcggtacacatcctcttatctggcccagtactttggcaagcacacctacgacggcaagtccatcaaggtgaagatcaagtataaccccatctgtatgggcaatatctacgtgctggacgaggataagcacgagttctttgccgtggagtctgtggaccctgattacgcctattctgtgagcgagtggctgcacaaggtgtgctgtgattatgcccggaaccacatcagaaacaattacaggcacaatgacgtgatcaaggcctggagagtgatctacgacatcatcgatgaggccctgcacctgtctggcaacggcaagcaggccaatgtgggcatccgccaggccagcaagctggagcgggtgagagagcacgcagagaggaccaagtcccaccagaagcccgagctgcacatgagctccaacgacgatatcgactgggatgtggaagtgaataccgatggctggaagatcgacagcgtgaggggcacaaacaagggctccggaaaacggacagccgacggaagcgagttcgagtcaccgaaaaagaagcgaaaagttggtggtagtggtggaagcggcgaggccagcggttccggacgggctgacgcattggacgattttgatctggatatgctgggaagtgacgccctcgatgattttgaccttgacatgcttggttcggatgcccttgatgactttgacctcgacatgctcggcagtgacgcccttgatgatttcgacctggacatgctgattaactctagatgagcggccgctcgagtctagagggcccgtttaaacccgctgatcagcctcgactgtgccttctagttgccagccatctgttgtttgcccctcccccgtgccttccttgaccctggaaggtgccactcccactgtcctttcctaataaaatgaggaaattgcatcgcattgtctgagtaggtgtcattctattctggggggtggggtggggcaggacagcaagggggaggattgggaagacaatagcaggcatgctggggatgcggtgggctctatggcttctgaggcggaaagaaccagctggggctctagggggtatccccacgcgccctgtagcggcgcattaagcgcggcgggtgtggtggttacgcgcagcgtgaccgctacacttgccagcgccctagcgcccgctcctttcgctttcttcccttcctttctcgccacgttcgccggctttccccgtcaagctctaaatcgggggctccctttagggttccgatttagtgctttacggcacctcgaccccaaaaaacttgattagggtgatggttcacgtagtgggccatcgccctgatagacggtttttcgccctttgacgttggagtccacgttctttaatagtggactcttgttccaaactggaacaacactcaaccctatctcggtctattcttttgatttataagggattttgccgatttcggcctattggttaaaaaatgagctgatttaacaaaaatttaacgcgaattaattctgtggaatgtgtgtcagttagggtgtggaaagtccccaggctccccagcaggcagaagtatgcaaagcatgcatctcaattagtcagcaaccaggtgtggaaagtccccaggctccccagcaggcagaagtatgcaaagcatgcatctcaattagtcagcaaccatagtcccgcccctaactccgcccatcccgcccctaactccgcccagttccgcccattctccgccccatggctgactaattttttttatttatgcagaggccgaggccgcctctgcctctgagctattccagaagtagtgaggaggcttttttggaggcctaggcttttgcaaaaagctcccgggagcttgtatatccattttcggatctgatcaagagacaggatgaggatcgtttcgcatgattgaacaagatggattgcacgcaggttctccggccgcttgggtggagaggctattcggctatgactgggcacaacagacaatcggctgctctgatgccgccgtgttccggctgtcagcgcaggggcgcccggttctttttgtcaagaccgacctgtccggtgccctgaatgaactgcaggacgaggcagcgcggctatcgtggctggccacgacgggcgttccttgcgcagctgtgctcgacgttgtcactgaagcgggaagggactggctgctattgggcgaagtgccggggcaggatctcctgtcatctcaccttgctcctgccgagaaagtatccatcatggctgatgcaatgcggcggctgcatacgcttgatccggctacctgcccattcgaccaccaagcgaaacatcgcatcgagcgagcacgtactcggatggaagccggtcttgtcgatcaggatgatctggacgaagagcatcaggggctcgcgccagccgaactgttcgccaggctcaaggcgcgcatgcccgacggcgaggatctcgtcgtgacccatggcgatgcctgcttgccgaatatcatggtggaaaatggccgcttttctggattcatcgactgtggccggctgggtgtggcggaccgctatcaggacatagcgttggctacccgtgatattgctgaagagcttggcggcgaatgggctgaccgcttcctcgtgctttacggtatcgccgctcccgattcgcagcgcatcgccttctatcgccttcttgacgagttcttctgagcgggactctggggttcgaaatgaccgaccaagcgacgcccaacctgccatcacgagatttcgattccaccgccgccttctatgaaaggttgggcttcggaatcgttttccgggacgccggctggatgatcctccagcgcggggatctcatgctggagttcttcgcccaccccaacttgtttattgcagcttataatggttacaaataaagcaatagcatcacaaatttcacaaataaagcatttttttcactgcattctagttgtggtttgtccaaactcatcaatgtatcttatcatgtctgtataccgtcgacctctagctagagcttggcgtaatcatggtcatagctgtttcctgtgtgaaattgttatccgctcacaattccacacaacatacgagccggaagcataaagtgtaaagcctggggtgcctaatgagtgagctaactcacattaattgcgttgcgctcactgcccgctttccagtcgggaaacctgtcgtgccagctgcattaatgaatcggccaacgcgcggggagaggcggtttgcgtattgggcgctcttccgcttcctcgctcactgactcgctgcgctcggtcgttcggctgcggcgagcggtatcagctcactcaaaggcggtaatacggttatccacagaatcaggggataacgcaggaaagaacatgtgagcaaaaggccagcaaaaggccaggaaccgtaaaaaggccgcgttgctggcgtttttccataggctccgcccccctgacgagcatcacaaaaatcgacgctcaagtcagaggtggcgaaacccgacaggactataaagataccaggcgtttccccctggaagctccctcgtgcgctctcctgttccgaccctgccgcttaccggatacctgtccgcctttctcccttcgggaagcgtggcgctttctcatagctcacgctgtaggtatctcagttcggtgtaggtcgttcgctccaagctgggctgtgtgcacgaaccccccgttcagcccgaccgctgcgccttatccggtaactatcgtcttgagtccaacccggtaagacacgacttatcgccactggcagcagccactggtaacaggattagcagagcgaggtatgtaggcggtgctacagagttcttgaagtggtggcctaactacggctacactagaagaacagtatttggtatctgcgctctgctgaagccagttaccttcggaaaaagagttggtagctcttgatccggcaaacaaaccaccgctggtagcggtttttttgtttgcaagcagcagattacgcgcagaaaaaaaggatctcaagaagatcctttgatcttttctacggggtctgacgctcagtggaacgaaaactcacgttaagggattttggtcatgagattatcaaaaaggatcttcacctagatccttttaaattaaaaatgaagttttaaatcaatctaaagtatatatgagtaaacttggtctgacagttaccaatgcttaatcagtgaggcacctatctcagcgatctgtctatttcgttcatccatagttgcctgactccccgtcgtgtagataactacgatacgggagggcttaccatctggccccagtgctgcaatgataccgcgagacccacgctcaccggctccagatttatcagcaataaaccagccagccggaagggccgagcgcagaagtggtcctgcaactttatccgcctccatccagtctattaattgttgccgggaagctagagtaagtagttcgccagttaatagtttgcgcaacgttgttgccattgctacaggcatcgtggtgtcacgctcgtcgtttggtatggcttcattcagctccggttcccaacgatcaaggcgagttacatgatcccccatgttgtgcaaaaaagcggttagctccttcggtcctccgatcgttgtcagaagtaagttggccgcagtgttatcactcatggttatggcagcactgcataattctcttactgtcatgccatccgtaagatgcttttctgtgactggtgagtactcaaccaagtcattctgagaatagtgtatgcggcgaccgagttgctcttgcccggcgtcaatacgggataataccgcgccacatagcagaactttaaaagtgctcatcattggaaaacgttcttcggggcgaaaactctcaaggatcttaccgctgttgagatccagttcgatgtaacccactcgtgcacccaactgatcttcagcatcttttactttcaccagcgtttctgggtgagcaaaaacaggaaggcaaaatgccgcaaaaaagggaataagggcgacacggaaatgttgaatactcatactcttcctttttcaatattattgaagcatttatcagggttattgtctcatgagcggatacatatttgaatgtatttagaaaaataaacaaataggggttccgcgcacatttccccgaaaagtgccacctgacgtc

SEQ ID NO: 154 - DNA, 8147 bp, Artificial Sequence
  Synthetic
gacggatcgggagatctcccgatcccctatggtcgactctcagtacaatctgctctgatgccgcatagttaagccagtatctgctccctgcttgtgtgttggaggtcgctgagtagtgcgcgagcaaaatttaagctacaacaaggcaaggcttgaccgacaattgcatgaagaatctgcttagggttaggcgttttgcgctgcttcgcgatgtacgggccagatatacgcgttgacattgattattgactagttattaatagtaatcaattacggggtcattagttcatagcccatatatggagttccgcgttacataacttacggtaaatggcccgcctggctgaccgcccaacgacccccgcccattgacgtcaataatgacgtatgttcccatagtaacgccaatagggactttccattgacgtcaatgggtggactatttacggtaaactgcccacttggcagtacatcaagtgtatcatatgccaagtacgccccctattgacgtcaatgacggtaaatggcccgcctggcattatgcccagtacatgaccttatgggactttcctacttggcagtacatctacgtattagtcatcgctattaccatggtgatgcggttttggcagtacatcaatgggcgtggatagcggtttgactcacggggatttccaagtctccaccccattgacgtcaatgggagtttgttttggcaccaaaatcaacgggactttccaaaatgtcgtaacaactccgccccattgacgcaaatgggcggtaggcgtgtacggtgggaggtctatataagcagagctctctggctaactagagaacccactgcttactggcttatcgaaattaatacgactcactatagggagacccagccaccatggccacatccctgccaaccccctctgccatcaccacaagcgccctggagtacgccttccacacaccagcaaggaacctgaccaagtcccgcggcaagaatatccacagatacgtgagcgtgaagatgagcaagaggatcacagtggagtccaccctggagtgcgacgcctgttaccacttcgattttgagccatctatcgtgcgcttctgtgcccagcccatccggtttctgtactatctgaacggccagagccactcctatgtgcctgacttcctggtgcagtttgataccaacgagttcgtgctgtacgaggtgaaaagcgcctatgccaagaataagccagactttgatgtggagtgggaggccaaggtgaaggcagcaacagagctgggcctggagctggagctggtggaggagtccgacatccgcgataccgtggtgctgaacaatctgaagcgcatgcaccgctacgcctccaaggacgagctgaacaatgtgcacaactctctgctgaagatcatcaagtataatggagcacagtccgccaggtgcctgggagagcagctgggcctgaagggaaggacagtgctgccaatcctgtgcgatctgctgtctaggtgtctgctggacacccgcctggataagcccctgtccctggagtctcggttcgagctggcaagctacggaggcagcggctccggaaaacggacagccgacggaagcgagttcgagtcaccaaagaagaagcggaaagtcggatccggctctggaggcgccaagaagggcttcagctcctttcaccgcaaggccgtgtctagccaggacaccctggagagcatcgagctggtgtcctctgccaactgcctggagagcgtgacataccaggacatctccgccttccctgaaaccatcgccgtggagatcaatttcagactgagcatcctgagatttctggccaggaagtgtgagacaatcgtggccaagtccatcgagcctcaccgggtggagctgcaacagaactatagccggaagatcccaagcgccatcaccatctaccgctggtggctggcctttcggaaaagcgactataatccaatctccctggcccccaacatcaaggatagaggcaatagggagacaaaggtgtccaccgtggtggactctatcatggagcaggcagtggagcgcgtgatcagcggacggaaggtgaacgtgagttccgcctataagagagtgcggagaaaggtgaggcagtacaatctgacccacggcacaaagtacacctatcccaagtacgagtccgtgagaaagagggtgaagaagaaaacccctttcgagctgctggcagcaggcaagggagagagggtggccaagcgggagtttaggcgcatgggcaagaagatcctgacatctagcgtgctggagcgggtggagatcgaccacaccgtggtggatctgttcgccgtgcacgaggagtatagaatccctctgggcaggccctggctgacccagctggtggactgctactctaaggccgtgatcggcttctatctgggctttgagccccctagctacgtgtctgtgagcctggccctgaagaacgccatccagagaaaggacgatctgatctcctcttatgagagcatcgagaacgagtggctgtgctacggcatcccagacctgctggtgacagataatggcaaggagttcctgagcaaggcctttgaccaggcctgtgagtccctgctgatcaacgtgcaccagaataaggtggagacacccgataataagcctcacgtcgagaggaactacggcacaatcaataccagcctgctggacgatctgcccggcaagtccttctctcagtacctccagagggagggatatgactccgtgggagaggccaccctgacactgaacgagatcagagagatctatctgatctggctggtggatatttaccacaagaagcccaatcagcgcggcaccaactgccctaatgtggcctggaagaagggctgtcaggagtgggagcctgaagagtttagcggctccaaggacgagctggatttcaagtttgccatcgtggactacaagcagctgacaaaagtgggcatcaccgtgtacaaggagctgtcttatagcaacgataggctggcagagtacaggggcaagaagggaaaccacaaggtgcagttcaagtataatccagagtgtatggccgtgatctgggtgctggacgaggatatgaacgagtactttacagtgaatgccatcgattacgagtatgcctctcgggtgagcctgtggcagcacaagtacaacatgaagtatcaggccgagctgaatagcgccgagtatgacgaggataaggagatcgacgccgagatcaagatcgaggagatcgccgatagatccatcgtgaaaaccaacaagatcagggcacggagaaggggagcaagacaccaggagaactctgccagggccaagtccatctctaacgccaatcctgcctctatccagaagcacgaggacgagatcgtgagcgccgataacgacgattgggacatcgattacgtgggtggtagtggtggaagcggcgaggccagcggttccggacgggctgacgcattggacgattttgatctggatatgctgggaagtgacgccctcgatgattttgaccttgacatgcttggttcggatgcccttgatgactttgacctcgacatgctcggcagtgacgcccttgatgatttcgacctggacatgctgattaactctagataaagggccctattctatagtgtcacctaaatgctagagctcgctgatcagcctcgactgtgccttctagttgccagccatctgttgtttgcccctcccccgtgccttccttgaccctggaaggtgccactcccactgtcctttcctaataaaatgaggaaattgcatcgcattgtctgagtaggtgtcattctattctggggggtggggtggggcaggacagcaagggggaggattgggaagacaatagcaggcatgctggggatgcggtgggctctatggcttctgaggcggaaagaaccagctggggctctagggggtatccccacgcgccctgtagcggcgcattaagcgcggcgggtgtggtggttacgcgcagcgtgaccgctacacttgccagcgccctagcgcccgctcctttcgctttcttcccttcctttctcgccacgttcgccggctttccccgtcaagctctaaatcggggcatccctttagggttccgatttagtgctttacggcacctcgaccccaaaaaacttgattagggtgatggttcacgtagtgggccatcgccctgatagacggtttttcgccctttgacgttggagtccacgttctttaatagtggactcttgttccaaactggaacaacactcaaccctatctcggtctattcttttgatttataagggattttggggatttcggcctattggttaaaaaatgagctgatttaacaaaaatttaacgcgaattaattctgtggaatgtgtgtcagttagggtgtggaaagtccccaggctccccaggcaggcagaagtatgcaaagcatgcatctcaattagtcagcaaccaggtgtggaaagtccccaggctccccagcaggcagaagtatgcaaagcatgcatctcaattagtcagcaaccatagtcccgcccctaactccgcccatcccgcccctaactccgcccagttccgcccattctccgccccatggctgactaattttttttatttatgcagaggccgaggccgcctctgcctctgagctattccagaagtagtgaggaggcttttttggaggcctaggcttttgcaaaaagctcccgggagcttgtatatccattttcggatctgatcaagagacaggatgaggatcgtttcgcatgattgaacaagatggattgcacgcaggttctccggccgcttgggtggagaggctattcggctatgactgggcacaacagacaatcggctgctctgatgccgccgtgttccggctgtcagcgcaggggcgcccggttctttttgtcaagaccgacctgtccggtgccctgaatgaactgcaggacgaggcagcgcggctatcgtggctggccacgacgggcgttccttgcgcagctgtgctcgacgttgtcactgaagcgggaagggactggctgctattgggcgaagtgccggggcaggatctcctgtcatctcaccttgctcctgccgagaaagtatccatcatggctgatgcaatgcggcggctgcatacgcttgatccggctacctgcccattcgaccaccaagcgaaacatcgcatcgagcgagcacgtactcggatggaagccggtcttgtcgatcaggatgatctggacgaagagcatcaggggctcgcgccagccgaactgttcgccaggctcaaggcgcgcatgcccgacggcgaggatctcgtcgtgacccatggcgatgcctgcttgccgaatatcatggtggaaaatggccgcttttctggattcatcgactgtggccggctgggtgtggcggaccgctatcaggacatagcgttggctacccgtgatattgctgaagagcttggcggcgaatgggctgaccgcttcctcgtgctttacggtatcgccgctcccgattcgcagcgcatcgccttctatcgccttcttgacgagttcttctgagcgggactctggggttcgaaatgaccgaccaagcgacgcccaacctgccatcacgagatttcgattccaccgccgccttctatgaaaggttgggcttcggaatcgttttccgggacgccggctggatgatcctccagcgcggggatctcatgctggagttcttcgcccaccccaacttgtttattgcagcttataatggttacaaataaagcaatagcatcacaaatttcacaaataaagcatttttttcactgcattctagttgtggtttgtccaaactcatcaatgtatcttatcatgtctgtataccgtcgacctctagctagagcttggcgtaatcatggtcatagctgtttcctgtgtgaaattgttatccgctcacaattccacacaacatacgagccggaagcataaagtgtaaagcctggggtgcctaatgagtgagctaactcacattaattgcgttgcgctcactgcccgctttccagtcgggaaacctgtcgtgccagctgcattaatgaatcggccaacgcgcggggagaggcggtttgcgtattgggcgctcttccgcttcctcgctcactgactcgctgcgctcggtcgttcggctgcggcgagcggtatcagctcactcaaaggcggtaatacggttatccacagaatcaggggataacgcaggaaagaacatgtgagcaaaaggccagcaaaaggccaggaaccgtaaaaaggccgcgttgctggcgtttttccataggctccgcccccctgacgagcatcacaaaaatcgacgctcaagtcagaggtggcgaaacccgacaggactataaagataccaggcgtttccccctggaagctccctcgtgcgctctcctgttccgaccctgccgcttaccggatacctgtccgcctttctcccttcgggaagcgtggcgctttctcaatgctcacgctgtaggtatctcagttcggtgtaggtcgttcgctccaagctgggctgtgtgcacgaaccccccgttcagcccgaccgctgcgccttatccggtaactatcgtcttgagtccaacccggtaagacacgacttatcgccactggcagcagccactggtaacaggattagcagagcgaggtatgtaggcggtgctacagagttcttgaagtggtggcctaactacggctacactagaaggacagtatttggtatctgcgctctgctgaagccagttaccttcggaaaaagagttggtagctcttgatccggcaaacaaaccaccgctggtagcggtggtttttttgtttgcaagcagcagattacgcgcagaaaaaaaggatctcaagaagatcctttgatcttttctacggggtctgacgctcagtggaacgaaaactcacgttaagggattttggtcatgagattatcaaaaaggatcttcacctagatccttttaaattaaaaatgaagttttaaatcaatctaaagtatatatgagtaaacttggtctgacagttaccaatgcttaatcagtgaggcacctatctcagcgatctgtctatttcgttcatccatagttgcctgactccccgtcgtgtagataactacgatacgggagggcttaccatctggccccagtgctgcaatgataccgcgagacccacgctcaccggctccagatttatcagcaataaaccagccagccggaagggccgagcgcagaagtggtcctgcaactttatccgcctccatccagtctattaattgttgccgggaagctagagtaagtagttcgccagttaatagtttgcgcaacgttgttgccattgctacaggcatcgtggtgtcacgctcgtcgtttggtatggcttcattcagctccggttcccaacgatcaaggcgagttacatgatcccccatgttgtgcaaaaaagcggttagctccttcggtcctccgatcgttgtcagaagtaagttggccgcagtgttatcactcatggttatggcagcactgcataattctcttactgtcatgccatccgtaagatgcttttctgtgactggtgagtactcaaccaagtcattctgagaatagtgtatgcggcgaccgagttgctcttgcccggcgtcaatacgggataataccgcgccacatagcagaactttaaaagtgctcatcattggaaaacgttcttcggggcgaaaactctcaaggatcttaccgctgttgagatccagttcgatgtaacccactcgtgcacccaactgatcttcagcatcttttactttcaccagcgtttctgggtgagcaaaaacaggaaggcaaaatgccgcaaaaaagggaataagggcgacacggaaatgttgaatactcatactcttcctttttcattattattgaagcatttatcagggttattgtctcatgagcggatacatatttgaatgtatttagaaaaataaacaaataggggttccgcgcacatttccccgaaaagtgccacctgacgtc

SEQ ID NO: 155 - DNA, 8833 bp, Artificial Sequence
  Synthetic
caactttgtatagaaaagttggctccgaatttctcgagttaattaaatgtgctgcaaggcgattaagttgggtaacgccagggttttcccagtcacgacgttgtaaaacgacggccagtgaattgtaatacgactcactatagggcgaattggagctaggcctacgtagcgcgcgagctccaccgcggtggactagttattaatagtaatcaattacggggtcattagttcatagcccatatatggagttccgcgttacataacttacggtaaatggcccgcctggctgaccgcccaacgacccccgcccattgacgtcaataatgacgtatgttcccatagtaacgccaatagggactttccattgacgtcaatgggtggactatttacggtaaactgcccacttggcagtacatcaagtgtatcatatgccaagtacgccccctattgacgtcaatgacggtaaatggcccgcctggcattatgcccagtacatgaccttatgggactttcctacttggcagtacatctacgtattagtcatcgctattaccatgggtcgaggtgagccccacgttctgcttcactctccccatctcccccccctccccacccccaattttgtatttatttattttttaattattttgtgcagcgatgggggcggggggggggggggcgcgcgccaggcggggcggggcggggcgaggggcggggcggggcgaggcggagaggtgcggcggcagccaatcagagcggcgcgctccgaaagtttccttttatggcgaggcggcggcggcggcggccctataaaaagcgaagcgcgcggcgggcgggagtcgagtcgctgcgttgccttcgccccgtgccccgctccgcgccgcctcgcgccgcccgccccggctctgactgaccgcgttactcccacaggtgagcgggcgggacggcccttctcctccgggctgtaattagcgcttggtttaatgacggctcgtttcttttctgtggctgcgtgaaagccttaaagggctccgggagggccctttgtgcgggggggagcggctcggggggtgcgtgcgtgtgtgtgtgcgtggggagcgccgcgtgcggcccgcgctgcccggcggctgtgagcgctgcgggcgcggcgcggggctttgtgcgctccgcgtgtgcgcgaggggagcgcggccgggggcggtgccccgcggtgcgggggggctgcgaggggaacaaaggctgcgtgcggggtgtgtgcgtgggggggtgagcagggggtgtgggcgcggcggtcgggctgtaacccccccctgcacccccctccccgagttgctgagcacggcccggcttcgggtgcggggctccgtgcggggcgtggcgcggggctcgccgtgccgggcggggggtggcggcaggtgggggtgccgggcggggcggggccgcctcgggccggggagggctcgggggaggggcgcggcggccccggagcgccggcggctgtcgaggcgcggcgagccgcagccattgccttttatggtaatcgtgcgagagggcgcagggacttcctttgtcccaaatctggcggagccgaaatctgggaggcgccgccgcaccccctctagcgggcgcggggcgaagcggtgcggcgccggcaggaaggaaatgggcggggagggccttcgtgcgtcgccgcgccgccgtccccttctccctctccagcctcggggctgtccgcggggggacggctgccttcgggggggacggggcagggcggggttcggcttctggcgtgtgaccggcggctctagagcctctgctaaccatgttcatgccttcttctttttcctacagctcctgggcaacgtgctggttattgtgctgtctcatcattttggcaaagaattcgaccccaagtttgtacaaaaaagcagcgccaccatggtgagcaagggcgaggagctgttcaccggggtggtgcccatcctggtcgagctggacggcgacgtaaacggccacaagttcagcgtgaggggcgagggcgagggcgatgccaccaacggcaagctgaccctgaagttcatctgcaccaccggcaagctgcccgtgccctggcccaccctcgtgaccaccctgagccacggcgtgcagtgcttcgcccgctaccccgaccacatgaagcagcacgacttcttcaagtccgccatgcccgaaggctacgtccaggagcgcaccatcttcttcaaggacgacggcacctacaagacccgcgccgaggtgaagttcgagggcgacaccctagtgaaccgcatcgagctgaagggcgtcgacttcaaggaggacggcaacatcctggggcacaagctggagtacaacttcaacagccacaacatctatatcatggccgtcaagcagaagaacggcatcaaggtgaacttcaagatccgccacaacgtggaggacggcagcgtgcagctcgccgaccactaccagcagaacacccccatcggcgacggccccgtgctgctgcccgacagccactacctgagcacccagtccgtgctgagcaaagaccccaacgagaagcgcgatcacatggtcctgctggagttccgcaccgccgccgggatcactctcggcatggacgagctgtacaagtaatacccagctttcttgtacaaagtggtacgcgtgaattcactcctcaggtgcaggctgcctatcagaaggtggtggctggtgtggccaatgccctggctcacaaataccactgagatctttttccctctgccaaaaattatggggacatcatgaagccccttgagcatctgacttctggctaataaaggaaatttattttcattgcaatagtgtgttggaattttttgtgtctctcactcggaaggacatatgggagggcaaatcatttaaaacatcagaatgagtatttggtttagagtttggcaacatatgcccatatgctggctgccatgaacaaaggttggctataaagaggtcatcagtatatgaaacagccccctgctgtccattccttattccatagaaaagccttgacttgaggttagattttttttatattttgttttgtgttatttttttctttaacatccctaaaattttccttacatgttttactagccagatttttcctcctctcctgactactcccagtcatagctgtccctcttctcttatggagatccctcgacctgcagcccaagcttggcgtaatcatggtcatagctgtttcctgtgtgaaattgttatccgctcacaattccacacaacatacgagccggaagcataaagtgtaaagcctggggtgcctaatgagtgagctaactcacattaattgcgttgcgctcactgcccgctttccagtcgggaaacctgtcgtgccagcggatcgacagtactaagcttggtagataagttgatttagccataaaatattgtttccgtgaccccttaattaatagggataacagggtaatctcgaggtttaaacgtcgacgcggccgctactagggacaggattggtgacagaaaagccccatccttaggcctcctccttcctagtctcctgatattgggtctaacccccacctcctgttaggcagattccttatctggtgacacacccccatttcctggagccatctctctccttgccagaacctctaaggtttgcttacgatggagccagagaggatcctgggagggagagcttggcagggggtgggagggaagggggggatgcgtgacctgcccggttctcagtggccaccctgcgctaccctctcccagaacctgagctgctctgacgcggctgtctggtgcgtttcactgatcctggtgctgcagcttccttacacttcccaagaggagaagcagtttggaaaaacaaaatcagaataagttggtcctgagttctaactttggctcttcacctttctagtccccaatttatattgttcctccgtgcgtcagttttacctgtgagataaggccagtagccagccccgtcctggcagggctgtggtgaggaggggggtgtccgtgtggaaaactccctttgtgagaatggtgcgtcctaggtgttcaccaggtcgtggccgcctctactccctttctctttctccatccttctttccttaaagagtccccagtgctatctgggacatattcctccgcccagagcagggtcccgcttccctaaggccctgctctgggcttctgggtttgagtccttggcaagcccaggagaggcgctcaggcttccctgtcccccttcctcgtccaccatctcatgcccctggctctcctgccccttccctacaggggttcctggctctgctctccaccgcggtggagctccagcttttgttccctttagtgagggttaattgcgcgcttggcgtaatcatggtcatagctgtttcctgtgtgaaattgttatccgctcacaattccacacaacatacgagccggaagcataaagtgtaaagcctggggtgcctaatgagtgagctaactcacattaattgcgttgcgctcactgcccgctttccagtcgggaaacctgtcgtgccagctgcattaatgaatcggccaacgcgcggggagaggcggtttgcgtattgggcgctcttccgcttcctcgctcactgactcgctgcgctcggtcgttcggctgcggcgagcggtatcagctcactcaaaggcggtaatacggttatccacagaatcaggggataacgcaggaaagaacatgtgagcaaaaggccagcaaaaggccaggaaccgtaaaaaggccgcgttgctggcgtttttccataggctccgcccccctgacgagcatcacaaaaatcgacgctcaagtcagaggtggcgaaacccgacaggactataaagataccaggcgtttccccctggaagctccctcgtgcgctctcctgttccgaccctgccgcttaccggatacctgtccgcctttctcccttcgggaagcgtggcgctttctcatagctcacgctgtaggtatctcagttcggtgtaggtcgttcgctccaagctgggctgtgtgcacgaaccccccgttcagcccgaccgctgcgccttatccggtaactatcgtcttgagtccaacccggtaagacacgacttatcgccactggcagcagccactggtaacaggattagcagagcgaggtatgtaggcggtgctacagagttcttgaagtggtggcctaactacggctacactagaagaacagtatttggtatctgcgctctgctgaagccagttaccttcggaaaaagagttggtagctcttgatccggcaaacaaaccaccgctggtagcggtggtttttttgtttgcaagcagcagattacgcgcagaaaaaaaggatctcaagaagatcctttgatcttttctacggggtctgacgctcagtggaacgaaaactcacgttaagggattttggtcatgagattatcaaaaaggatcttcacctagatccttttaaattaaaaatgaagttttaaatcaatctaaagtatatatgagtaaacttggtctgacagttaccaatgcttaatcagtgaggcacctatctcagcgatctgtctatttcgttcatccatagttgcctgactccccgtcgtgtagataactacgatacgggagggcttaccatctggccccagtgctgcaatgataccgcgagacccacgctcaccggctccagatttatcagcaataaaccagccagccggaagggccgagcgcagaagtggtcctgcaactttatccgcctccatccagtctattaattgttgccgggaagctagagtaagtagttcgccagttaatagtttgcgcaacgttgttgccattgctacaggcatcgtggtgtcacgctcgtcgtttggtatggcttcattcagctccggttcccaacgatcaaggcgagttacatgatcccccatgttgtgcaaaaaagcggttagctccttcggtcctccgatcgttgtcagaagtaagttggccgcagtgttatcactcatggttatggcagcactgcataattctcttactgtcatgccatccgtaagatgcttttctgtgactggtgagtactcaaccaagtcattctgagaatagtgtatgcggcgaccgagttgctcttgcccggcgtcaatacgggataataccgcgccacatagcagaactttaaaagtgctcatcattggaaaacgttcttcggggcgaaaactctcaaggatcttaccgctgttgagatccagttcgatgtaacccactcgtgcacccaactgatcttcagcatcttttactttcaccagcgtttctgggtgagcaaaaacaggaaggcaaaatgccgcaaaaaagggaataagggcgacacggaaatgttgaatactcatactcttcctttttcaatattattgaagcatttatcagggttattgtctcatgagcggatacatatttgaatgtatttagaaaaataaacaaataggggttccgcgcacatttccccgaaaagtgccacctaaattgtaagcgttaatattttgttaaaattcgcgttaaatttttgttaaatcagctcattttttaaccaataggccgaaatcggcaaaatcccttataaatcaaaagaatagaccgagatagggttgagtgttgttccagtttggaacaagagtccactattaaagaacgtggactccaacgtcaaagggcgaaaaaccgtctatcagggcgatggcccactacgtgaaccatcaccctaatcaagttttttggggtcgaggtgccgtaaagcactaaatcggaaccctaaagggagcccccgatttagagcttgacggggaaagccggcgaacgtggcgagaaaggaagggaagaaagcgaaaggagcgggcgctagggcgctggcaagtgtagcggtcacgctgcgcgtaaccaccacacccgccgcgcttaatgcgccgctacagggcgcgtcccattcgccattcaggctgcgcaactgttgggaagggcgatcggtgcgggcctcttcgctattacgccagctggcgaaagggggatgtgctgcaaggcgattaagttgggtaacgccagggttttcccagtcacgacgttgtaaaacgacggccagtgagcgcgcgtaatacgactcactatagggcgaattgggtacctgctttctctgaccagcattctctcccctgggcctgtgccgctttctgtctgcagcttgtggcctgggtcacctctacggctggcccagatccttccctgccgcctccttcaggttccgtcttcctccactccctcttccccttgctctctgctgtgttgctgcccaaggatgctctttccggagcacttccttctcggcgctgcaccacgtgatgtcctctgagcggatcctccccgtgtctgggtcctctccgggcatctctcctccctcacccaaccccatgccgtcttcactcgctgggttcccttttccttctccttctggggcctgtgccatctctcgtttcttaggatggccttctccgacggatgtctcccttgcgtcccgcctccccttcttgtaggcctgcatcatcaccgtttttctggacaaccccaaagtaccccgtctccctggctttagccacctctccatcctcttgctttctttgcctggacaccccgttctcctgtggattcgggtcacctctcactcctttcatttgggcagctcccctaccccccttacctctctagtctgtgctagctcttccagccccctgtcatggcatcttccaggggtccgagagctcagctagtcttcttcctccaacccgggcccctatgtccacttcaggacagcatgtttgctgcctccagggatcctgtgtccccgagctgggaccaccttatattcccagggccggttaatgtggctctggttctgggtacttttatctgtcccctccaccccacagtggggcaagcttattaccctgttatccctaaccggttgcttgcaaaagcagtaattggaaagcactctcaaagaatccaagcttctgacctcttctcttcctcccacagggcctcgagacaattgcatcgatggtaccagtgaaagtctgcaatgaattcgagttggcgcgcctgtcattctaaatctctctttcagcctaaagctttttccccgtatccccccaggtgtctgcaggctcaaagagcagcgagaagcgttcagaggaaagcgatcccgtgccaccttccccgtgcccgggctgtccccgcacgctgccggctcggggatgcggggggagcgccggaccggagcggagccccgggcggctcgctgctgccccctagcgggggagggacgtaattacatccctgggggctttgggagggggctgtccccgtgagctcccaggcgcgcctgtcattctaaatctctctttcagcctaaagctttttccccgtatccccccaggtgtctgcaggctcaaagagcagcgagaagcgttcagaggaaagcgatcccgtgccaccttccccgtgcccgggctgtccccgcacgctgccggctcggggatgcggggggagcgccggaccggagcggagccccgggcggctcgctgctgccccctagcgggggagggacgtaattacatccctgggggctttgggggggggctgtccccgtgagctcccaggcgcgccaactcggtaccgtatcgatgtcgacgttaacgctagtgatat

SEQ ID NO: 156 - DNA, 4883 bp, Artificial Sequence
  Synthetic
cagctggcgaaagggggatgtgctgcaaggcgattaagttgggtaacgccagggttttcccagtcacgacgttgtaaaacgacggccagtgaattgtaatacgactcactatagggcgaattgggccctctagatgcatgctcgagcggccgccagtgtgatggatatctgcagaattcgcccttgcgacgtagggataacagggtaatcctcaggagactgtgtaacaccaatgcaggcaaatcaaccttagtctgaaggcctaggcaaagaagaacacaacttacttcttaaggtcccctccaccccacagtggggcgaggtaggcgtgtacggtgggaggcctatataagcagagctcgtttagtgaaccgtcagatcgcctggagaattcgccaccatggactacaaggatgacgacgataaaacttccggtggcggactgggttccaccgcgagcaagggcgaggaggataacatggccatcatcaaggagttcatgcgcttcaaggtgcacatggagggctccgtgaacggccacgagttcgagatcgagggcgagggcgagggccgcccctacgagggcacccagaccgccaagctgaaggtgaccaagggcggccccctgcccttcgcctgggacatcctgtcccctcagttcatgtacggctccaaggcctacgtgaagcaccccgccgacatccccgactacttgaagctgtccttccccgagggcttcaagtgggagcgcgtgatgaacttcgaggacggcggcgtggtgaccgtgacccaggactcctccctacaggacggcgagttcatctacaaggtgaagctgcgcggcaccaacttcccctccgacggccccgtaatgcagaagaagacgatgggctgggaggcctcctccgagcggatgtaccccgaggacggcgccctgaagggcgagatcaagcagaggctgaagctgaaggacggcggccactacgacgccgaggtcaagaccacctacaaggccaagaagcccgtgcagctgcccggcgcctacaacgtcaacatcaagttggacatcacctcccacaacgaggactacaccatcgtggaacagtacgagcgcgccgagggccgccactccaccggcggcatggacgagctgtacaaggcccgcggttaagatgcatgccagttctaggaattcgagctcggtacccggggatcctctagtcagctgacgcgtgctagcgcggccgcatcgataagcttgtcgacgatatctctagaggatcataatcagccataccacatttgtagaggttttacttgctttaaaaaacctcccacacctccccctgaacctgaaacataaaatgaatgcaattgttgttgttaacttgtttattgcagcttataatggttacaaataaagcaatagcatcacaaatttcacaaataaagcatttttttcactgcctcgagcttcctcgctcactgactcgctgcgctcggtcgttcggctgcggcgagcggtatcagctcactcaaaggcggtaataaagggcgaattccagcacactggcggccgttactagtggatccgagctcggtaccaagcttgatgcatagcttgagtattctatagtgtcacctaaatagcttggcgtaatcatggtcatagctgtttcctgtgtgaaattgttatccgctcacaattccacacaacatacgagccggaagcataaagtgtaaagcctggggtgcctaatgagtgagctaactcacattaattgcgttgcgctcactgcccgctttccagtcgggaaacctgtcgtgccagctgcattaatgaatcggccaacgcgcggggagaggcggtttgcgtattgggcgctcttccgcttcctcgctcactgactcgctgcgctcggtcgttcggctgcggcgagcggtatcagctcactcaaaggcggtaatacggttatccacagaatcaggggataacgcaggaaagaacatgtgagcaaaaggccagcaaaaggccaggaaccgtaaaaaggccgcgttgctggcgtttttccataggctccgcccccctgacgagcatcacaaaaatcgacgctcaagtcagaggtggcgaaacccgacaggactataaagataccaggcgtttccccctggaagctccctcgtgcgctctcctgttccgaccctgccgcttaccggatacctgtccgcctttctcccttcgggaagcgtggcgctttctcatagctcacgctgtaggtatctcagttcggtgtaggtcgttcgctccaagctgggctgtgtgcacgaaccccccgttcagcccgaccgctgcgccttatccggtaactatcgtcttgagtccaacccggtaagacacgacttatcgccactggcagcagccactggtaacaggattagcagagcgaggtatgtaggcggtgctacagagttcttgaagtggtggcctaactacggctacactagaagaacagtatttggtatctgcgctctgctgaagccagttaccttcggaaaaagagttggtagctcttgatccggcaaacaaaccaccgctggtagcggtggtttttttgtttgcaagcagcagattacgcgcagaaaaaaaggatctcaagaagatcctttgatcttttctacggggtctgacgctcagtggaacgaaaactcacgttaagggattttggtcatgagattatcaaaaaggatcttcacctagatccttttaaattaaaaatgaagttttagcacgtgtcagtcctgctcctcggccacgaagtgcacgcagttgccggccgggtcgcgcagggcgaactcccgcccccacggctgctcgccgatctcggtcatggccggcccggaggcgtcccggaagttcgtggacacgacctccgaccactcggcgtacagctcgtccaggccgcgcacccacacccaggccagggtgttgtccggcaccacctggtcctggaccgcgctgatgaacagggtcacgtcgtcccggaccacaccggcgaagtcgtcctccacgaagtcccgggagaacccgagccggtcggtccagaactcgaccgctccggcgacgtcgcgcgcggtgagcaccggaacggcactggtcaacttggccatggtggccctcctcacgtgctattattgaagcatttatcagggttattgtctcatgagcggatacatatttgaatgtatttagaaaaataaacaaataggggttccgcgcacatttccccgaaaagtgccacctgatgcggtgtgaaataccgcacagatgcgtaaggagaaaataccgcatcaggaaattgtaagcgttaataattcagaagaactcgtcaagaaggcgatagaaggcgatgcgctgcgaatcgggagcggcgataccgtaaagcacgaggaagcggtcagcccattcgccgccaagctcttcagcaatatcacgggtagccaacgctatgtcctgatagcggtccgccacacccagccggccacagtcgatgaatccagaaaagcggccattttccaccatgatattcggcaagcaggcatcgccatgggtcacgacgagatcctcgccgtcgggcatgctcgccttgagcctggcgaacagttcggctggcgcgagcccctgatgctcttcgtccagatcatcctgatcgacaagaccggcttccatccgagtacgtgctcgctcgatgcgatgtttcgcttggtggtcgaatgggcaggtagccggatcaagcgtatgcagccgccgcattgcatcagccatgatggatactttctcggcaggagcaaggtgagatgacaggagatcctgccccggcacttcgcccaatagcagccagtcccttcccgcttcagtgacaacgtcgagcacagctgcgcaaggaacgcccgtcgtggccagccacgatagccgcgctgcctcgtcttgcagttcattcagggcaccggacaggtcggtcttgacaaaaagaaccgggcgcccctgcgctgacagccggaacacggcggcatcagagcagccgattgtctgttgtgcccagtcatagccgaatagcctctccacccaagcggccggagaacctgcgtgcaatccatcttgttcaatcatgcgaaacgatcctcatcctgtctcttgatcagagcttgatcccctgcgccatcagatccttggcggcaagaaagccatccagtttactttgcagggcttcccaaccttaccagagggcgccccagctggcaattccggttcgcttgctgtccataaaaccgcccagtctagctatcgccatgtaagcccactgcaagctacctgctttctctttgcgcttgcgttttcccttgtccagatagcccagtagctgacattcatccggggtcagcaccgtttctgcggactggctttctacgtgaaaaggatctaggtgaagatcctttttgataatctcatgcctgacatttatattccccagaacatcaggttaatggcgtttttgatgtcattttcgcggtggctgagatcagccacttcttccccgataacggagaccggcacactggccatatcggtggtcatcatgcgccagctttcatccccgatatgcaccaccgggtaaagttcacgggagactttatctgacagcagacgtgcactggccagggggatcaccatccgtcgccccggcgtgtcaataatatcactctgtacatccacaaacagacgataacggctctctcttttataggtgtaaaccttaaactgccgtacgtataggctgcgcaactgttgggaagggcgatcggtgcgggcctcttcgctattacgc

SEQ ID NO: 157 - DNA, 6146 bp, Artificial Sequence
  Synthetic
gacggatcgggagatctcccgatcccctatggtcgactctcagtacaatctgctctgatgccgcatagttaagccagtatctgctccctgcttgtgtgttggaggtcgctgagtagtgcgcgagcaaaatttaagctacaacaaggcaaggcttgaccgacaattgcatgaagaatctgcttagggttaggcgttttgcgctgcttcgcgatgtacgggccagatatacgcgttgacattgattattgactagttattaatagtaatcaattacggggtcattagttcatagcccatatatggagttccgcgttacataacttacggtaaatggcccgcctggctgaccgcccaacgacccccgcccattgacgtcaataatgacgtatgttcccatagtaacgccaatagggactttccattgacgtcaatgggtggactatttacggtaaactgcccacttggcagtacatcaagtgtatcatatgccaagtacgccccctattgacgtcaatgacggtaaatggcccgcctggcattatgcccagtacatgaccttatgggactttcctacttggcagtacatctacgtattagtcatcgctattaccatggtgatgcggttttggcagtacatcaatgggcgtggatagcggtttgactcacggggatttccaagtctccaccccattgacgtcaatgggagtttgttttggcaccaaaatcaacgggactttccaaaatgtcgtaacaactccgccccattgacgcaaatgggcggtaggcgtgtacggtgggaggtctatataagcagagctctctggctaactagagaacccactgcttactggcttatcgaaattaatacgactcactatagggagacccaagcttggtaccgagctcggatccctacttccaatccaatgccaccatgggcccgaaaaagaagcgaaaagttggctccggaatggccacatccctgccaaccccctctgccatcaccacaagcgccctggagtacgccttccacacaccagcaaggaacctgaccaagtcccgcggcaagaatatccacagatacgtgagcgtgaagatgagcaagaggatcacagtggagtccaccctggagtgcgacgcctgttaccacttcgattttgagccatctatcgtgcgcttctgtgcccagcccatccggtttctgtactatctgaacggccagagccactcctatgtgcctgacttcctggtgcagtttgataccaacgagttcgtgctgtacgaggtgaaaagcgcctatgccaagaataagccagactttgatgtggagtgggaggccaaggtgaaggcagcaacagagctgggcctggagctggagctggtggaggagtccgacatccgcgataccgtggtgctgaacaatctgaagcgcatgcaccgctacgcctccaaggacgagctgaacaatgtgcacaactctctgctgaagatcatcaagtataatggagcacagtccgccaggtgcctgggagagcagctgggcctgaagggaaggacagtgctgccaatcctgtgcgatctgctgtctaggtgtctgctggacacccgcctggataagcccctgtccctggagtctcggttcgagctggcaagctacggataattacattggaagtggataatctagagggccctattctatagtgtcacctaaatgctagagctcgctgatcagcctcgactgtgccttctagttgccagccatctgttgtttgcccctcccccgtgccttccttgaccctggaaggtgccactcccactgtcctttcctaataaaatgaggaaattgcatcgcattgtctgagtaggtgtcattctattctggggggtggggtggggcaggacagcaagggggaggattgggaagacaatagcaggcatgctggggatgcggtgggctctatggcttctgaggcggaaagaaccagctggggctctagggggtatccccacgcgccctgtagcggcgcattaagcgcggcgggtgtggtggttacgcgcagcgtgaccgctacacttgccagcgccctagcgcccgctcctttcgctttcttcccttcctttctcgccacgttcgccggctttccccgtcaagctctaaatcggggcatccctttagggttccgatttagtgctttacggcacctcgaccccaaaaaacttgattagggtgatggttcacgtagtgggccatcgccctgatagacggtttttcgccctttgacgttggagtccacgttctttaatagtggactcttgttccaaactggaacaacactcaaccctatctcggtctattcttttgatttataagggattttggggatttcggcctattggttaaaaaatgagctgatttaacaaaaatttaacgcgaattaattctgtggaatgtgtgtcagttagggtgtggaaagtccccaggctccccaggcaggcagaagtatgcaaagcatgcatctcaattagtcagcaaccaggtgtggaaagtccccaggctccccagcaggcagaagtatgcaaagcatgcatctcaattagtcagcaaccatagtcccgcccctaactccgcccatcccgcccctaactccgcccagttccgcccattctccgccccatggctgactaattttttttatttatgcagaggccgaggccgcctctgcctctgagctattccagaagtagtgaggaggcttttttggaggcctaggcttttgcaaaaagctcccgggagcttgtatatccattttcggatctgatcaagagacaggatgaggatcgtttcgcatgattgaacaagatggattgcacgcaggttctccggccgcttgggtggagaggctattcggctatgactgggcacaacagacaatcggctgctctgatgccgccgtgttccggctgtcagcgcaggggcgcccggttctttttgtcaagaccgacctgtccggtgccctgaatgaactgcaggacgaggcagcgcggctatcgtggctggccacgacgggcgttccttgcgcagctgtgctcgacgttgtcactgaagcgggaagggactggctgctattgggcgaagtgccggggcaggatctcctgtcatctcaccttgctcctgccgagaaagtatccatcatggctgatgcaatgcggcggctgcatacgcttgatccggctacctgcccattcgaccaccaagcgaaacatcgcatcgagcgagcacgtactcggatggaagccggtcttgtcgatcaggatgatctggacgaagagcatcaggggctcgcgccagccgaactgttcgccaggctcaaggcgcgcatgcccgacggcgaggatctcgtcgtgacccatggcgatgcctgcttgccgaatatcatggtggaaaatggccgcttttctggattcatcgactgtggccggctgggtgtggcggaccgctatcaggacatagcgttggctacccgtgatattgctgaagagcttggcggcgaatgggctgaccgcttcctcgtgctttacggtatcgccgctcccgattcgcagcgcatcgccttctatcgccttcttgacgagttcttctgagcgggactctggggttcgaaatgaccgaccaagcgacgcccaacctgccatcacgagatttcgattccaccgccgccttctatgaaaggttgggcttcggaatcgttttccgggacgccggctggatgatcctccagcgcggggatctcatgctggagttcttcgcccaccccaacttgtttattgcagcttataatggttacaaataaagcaatagcatcacaaatttcacaaataaagcatttttttcactgcattctagttgtggtttgtccaaactcatcaatgtatcttatcatgtctgtataccgtcgacctctagctagagcttggcgtaatcatggtcatagctgtttcctgtgtgaaattgttatccgctcacaattccacacaacatacgagccggaagcataaagtgtaaagcctggggtgcctaatgagtgagctaactcacattaattgcgttgcgctcactgcccgctttccagtcgggaaacctgtcgtgccagctgcattaatgaatcggccaacgcgcggggagaggcggtttgcgtattgggcgctcttccgcttcctcgctcactgactcgctgcgctcggtcgttcggctgcggcgagcggtatcagctcactcaaaggcggtaatacggttatccacagaatcaggggataacgcaggaaagaacatgtgagcaaaaggccagcaaaaggccaggaaccgtaaaaaggccgcgttgctggcgtttttccataggctccgcccccctgacgagcatcacaaaaatcgacgctcaagtcagaggtggcgaaacccgacaggactataaagataccaggcgtttccccctggaagctccctcgtgcgctctcctgttccgaccctgccgcttaccggatacctgtccgcctttctcccttcgggaagcgtggcgctttctcaatgctcacgctgtaggtatctcagttcggtgtaggtcgttcgctccaagctgggctgtgtgcacgaaccccccgttcagcccgaccgctgcgccttatccggtaactatcgtcttgagtccaacccggtaagacacgacttatcgccactggcagcagccactggtaacaggattagcagagcgaggtatgtaggcggtgctacagagttcttgaagtggtggcctaactacggctacactagaaggacagtatttggtatctgcgctctgctgaagccagttaccttcggaaaaagagttggtagctcttgatccggcaaacaaaccaccgctggtagcggtggtttttttgtttgcaagcagcagattacgcgcagaaaaaaaggatctcaagaagatcctttgatcttttctacggggtctgacgctcagtggaacgaaaactcacgttaagggattttggtcatgagattatcaaaaaggatcttcacctagatccttttaaattaaaaatgaagttttaaatcaatctaaagtatatatgagtaaacttggtctgacagttaccaatgcttaatcagtgaggcacctatctcagcgatctgtctatttcgttcatccatagttgcctgactccccgtcgtgtagataactacgatacgggagggcttaccatctggccccagtgctgcaatgataccgcgagacccacgctcaccggctccagatttatcagcaataaaccagccagccggaagggccgagcgcagaagtggtcctgcaactttatccgcctccatccagtctattaattgttgccgggaagctagagtaagtagttcgccagttaatagtttgcgcaacgttgttgccattgctacaggcatcgtggtgtcacgctcgtcgtttggtatggcttcattcagctccggttcccaacgatcaaggcgagttacatgatcccccatgttgtgcaaaaaagcggttagctccttcggtcctccgatcgttgtcagaagtaagttggccgcagtgttatcactcatggttatggcagcactgcataattctcttactgtcatgccatccgtaagatgcttttctgtgactggtgagtactcaaccaagtcattctgagaatagtgtatgcggcgaccgagttgctcttgcccggcgtcaatacgggataataccgcgccacatagcagaactttaaaagtgctcatcattggaaaacgttcttcggggcgaaaactctcaaggatcttaccgctgttgagatccagttcgatgtaacccactcgtgcacccaactgatcttcagcatcttttactttcaccagcgtttctgggtgagcaaaaacaggaaggcaaaatgccgcaaaaaagggaataagggcgacacggaaatgttgaatactcatactcttcctttttcattattattgaagcatttatcagggttattgtctcatgagcggatacatatttgaatgtatttagaaaaataaacaaataggggttccgcgcacatttccccgaaaagtgccacctgacgtc

SEQ ID NO: 158 - DNA, 6113 bp, Artificial Sequence
  Synthetic
gacggatcgggagatctcccgatcccctatggtcgactctcagtacaatctgctctgatgccgcatagttaagccagtatctgctccctgcttgtgtgttggaggtcgctgagtagtgcgcgagcaaaatttaagctacaacaaggcaaggcttgaccgacaattgcatgaagaatctgcttagggttaggcgttttgcgctgcttcgcgatgtacgggccagatatacgcgttgacattgattattgactagttattaatagtaatcaattacggggtcattagttcatagcccatatatggagttccgcgttacataacttacggtaaatggcccgcctggctgaccgcccaacgacccccgcccattgacgtcaataatgacgtatgttcccatagtaacgccaatagggactttccattgacgtcaatgggtggactatttacggtaaactgcccacttggcagtacatcaagtgtatcatatgccaagtacgccccctattgacgtcaatgacggtaaatggcccgcctggcattatgcccagtacatgaccttatgggactttcctacttggcagtacatctacgtattagtcatcgctattaccatggtgatgcggttttggcagtacatcaatgggcgtggatagcggtttgactcacggggatttccaagtctccaccccattgacgtcaatgggagtttgttttggcaccaaaatcaacgggactttccaaaatgtcgtaacaactccgccccattgacgcaaatgggcggtaggcgtgtacggtgggaggtctatataagcagagctctctggctaactagagaacccactgcttactggcttatcgaaattaatacgactcactatagggagacccaagcttggtaccgagctcggatccctacttccaatccaatgccaccatgggcccgaaaaagaagcgaaaagttggctccggagtgaagtggtactataagaccatcacattcctgcctgagctgtgcaacaatgagtctctggcagcaaagtgtctgcgggtgctgcacggcttcaattaccagtatgagacaagaaacatcggcgtgtcctttccactgtggtgcgacgccaccgtgggcaagaagatctctttcgtgagcaagaacaagatcgagctggatctgctgctgaagcagcactacttcgtgcagatggagcagctccagtattttcacatcagcaatacagtgctggtgcccgaggactgcacctacgtgagctttcggagatgtcagtccatcgataagctgaccgcagcaggactggcaagaaagatcaggcgcctggagaagcgggccctgtccagaggcgagcagttcgacccatctagctttgcccagaaggagcacacagccatcgcccactaccactctctgggcgagtcctctaagcagaccaatcggaacttcagactgaacatcaggatgctgagtgagcagccaagggagggcaattccatcttcagctcctatggcctgagcaattccgagaactcttttcagcccgtgcctctgatcggctcgagcgagggaaggggctctctgctgacctgcggcgacgtggaggagaaccctggataattacattggaagtggataatctagagggccctattctatagtgtcacctaaatgctagagctcgctgatcagcctcgactgtgccttctagttgccagccatctgttgtttgcccctcccccgtgccttccttgaccctggaaggtgccactcccactgtcctttcctaataaaatgaggaaattgcatcgcattgtctgagtaggtgtcattctattctggggggtggggtggggcaggacagcaagggggaggattgggaagacaatagcaggcatgctggggatgcggtgggctctatggcttctgaggcggaaagaaccagctggggctctagggggtatccccacgcgccctgtagcggcgcattaagcgcggcgggtgtggtggttacgcgcagcgtgaccgctacacttgccagcgccctagcgcccgctcctttcgctttcttcccttcctttctcgccacgttcgccggctttccccgtcaagctctaaatcggggcatccctttagggttccgatttagtgctttacggcacctcgaccccaaaaaacttgattagggtgatggttcacgtagtgggccatcgccctgatagacggtttttcgccctttgacgttggagtccacgttctttaatagtggactcttgttccaaactggaacaacactcaaccctatctcggtctattcttttgatttataagggattttggggatttcggcctattggttaaaaaatgagctgatttaacaaaaatttaacgcgaattaattctgtggaatgtgtgtcagttagggtgtggaaagtccccaggctccccaggcaggcagaagtatgcaaagcatgcatctcaattagtcagcaaccaggtgtggaaagtccccaggctccccagcaggcagaagtatgcaaagcatgcatctcaattagtcagcaaccatagtcccgcccctaactccgcccatcccgcccctaactccgcccagttccgcccattctccgccccatggctgactaattttttttatttatgcagaggccgaggccgcctctgcctctgagctattccagaagtagtgaggaggcttttttggaggcctaggcttttgcaaaaagctcccgggagcttgtatatccattttcggatctgatcaagagacaggatgaggatcgtttcgcatgattgaacaagatggattgcacgcaggttctccggccgcttgggtggagaggctattcggctatgactgggcacaacagacaatcggctgctctgatgccgccgtgttccggctgtcagcgcaggggcgcccggttctttttgtcaagaccgacctgtccggtgccctgaatgaactgcaggacgaggcagcgcggctatcgtggctggccacgacgggcgttccttgcgcagctgtgctcgacgttgtcactgaagcgggaagggactggctgctattgggcgaagtgccggggcaggatctcctgtcatctcaccttgctcctgccgagaaagtatccatcatggctgatgcaatgcggcggctgcatacgcttgatccggctacctgcccattcgaccaccaagcgaaacatcgcatcgagcgagcacgtactcggatggaagccggtcttgtcgatcaggatgatctggacgaagagcatcaggggctcgcgccagccgaactgttcgccaggctcaaggcgcgcatgcccgacggcgaggatctcgtcgtgacccatggcgatgcctgcttgccgaatatcatggtggaaaatggccgcttttctggattcatcgactgtggccggctgggtgtggcggaccgctatcaggacatagcgttggctacccgtgatattgctgaagagcttggcggcgaatgggctgaccgcttcctcgtgctttacggtatcgccgctcccgattcgcagcgcatcgccttctatcgccttcttgacgagttcttctgagcgggactctggggttcgaaatgaccgaccaagcgacgcccaacctgccatcacgagatttcgattccaccgccgccttctatgaaaggttgggcttcggaatcgttttccgggacgccggctggatgatcctccagcgcggggatctcatgctggagttcttcgcccaccccaacttgtttattgcagcttataatggttacaaataaagcaatagcatcacaaatttcacaaataaagcatttttttcactgcattctagttgtggtttgtccaaactcatcaatgtatcttatcatgtctgtataccgtcgacctctagctagagcttggcgtaatcatggtcatagctgtttcctgtgtgaaattgttatccgctcacaattccacacaacatacgagccggaagcataaagtgtaaagcctggggtgcctaatgagtgagctaactcacattaattgcgttgcgctcactgcccgctttccagtcgggaaacctgtcgtgccagctgcattaatgaatcggccaacgcgcggggagaggcggtttgcgtattgggcgctcttccgcttcctcgctcactgactcgctgcgctcggtcgttcggctgcggcgagcggtatcagctcactcaaaggcggtaatacggttatccacagaatcaggggataacgcaggaaagaacatgtgagcaaaaggccagcaaaaggccaggaaccgtaaaaaggccgcgttgctggcgtttttccataggctccgcccccctgacgagcatcacaaaaatcgacgctcaagtcagaggtggcgaaacccgacaggactataaagataccaggcgtttccccctggaagctccctcgtgcgctctcctgttccgaccctgccgcttaccggatacctgtccgcctttctcccttcgggaagcgtggcgctttctcaatgctcacgctgtaggtatctcagttcggtgtaggtcgttcgctccaagctgggctgtgtgcacgaaccccccgttcagcccgaccgctgcgccttatccggtaactatcgtcttgagtccaacccggtaagacacgacttatcgccactggcagcagccactggtaacaggattagcagagcgaggtatgtaggcggtgctacagagttcttgaagtggtggcctaactacggctacactagaaggacagtatttggtatctgcgctctgctgaagccagttaccttcggaaaaagagttggtagctcttgatccggcaaacaaaccaccgctggtagcggtggtttttttgtttgcaagcagcagattacgcgcagaaaaaaaggatctcaagaagatcctttgatcttttctacggggtctgacgctcagtggaacgaaaactcacgttaagggattttggtcatgagattatcaaaaaggatcttcacctagatccttttaaattaaaaatgaagttttaaatcaatctaaagtatatatgagtaaacttggtctgacagttaccaatgcttaatcagtgaggcacctatctcagcgatctgtctatttcgttcatccatagttgcctgactccccgtcgtgtagataactacgatacgggagggcttaccatctggccccagtgctgcaatgataccgcgagacccacgctcaccggctccagatttatcagcaataaaccagccagccggaagggccgagcgcagaagtggtcctgcaactttatccgcctccatccagtctattaattgttgccgggaagctagagtaagtagttcgccagttaatagtttgcgcaacgttgttgccattgctacaggcatcgtggtgtcacgctcgtcgtttggtatggcttcattcagctccggttcccaacgatcaaggcgagttacatgatcccccatgttgtgcaaaaaagcggttagctccttcggtcctccgatcgttgtcagaagtaagttggccgcagtgttatcactcatggttatggcagcactgcataattctcttactgtcatgccatccgtaagatgcttttctgtgactggtgagtactcaaccaagtcattctgagaatagtgtatgcggcgaccgagttgctcttgcccggcgtcaatacgggataataccgcgccacatagcagaactttaaaagtgctcatcattggaaaacgttcttcggggcgaaaactctcaaggatcttaccgctgttgagatccagttcgatgtaacccactcgtgcacccaactgatcttcagcatcttttactttcaccagcgtttctgggtgagcaaaaacaggaaggcaaaatgccgcaaaaaagggaataagggcgacacggaaatgttgaatactcatactcttcctttttcattattattgaagcatttatcagggttattgtctcatgagcggatacatatttgaatgtatttagaaaaataaacaaataggggttccgcgcacatttccccgaaaagtgccacctgacgtc

SEQ ID NO: 159 - DNA, 4801 bp, Artificial Sequence
  Synthetic
ttgcccggcgtcaatacgggataataccgcgccacatagcagaactttaaaagtgctcatcattggaaaacgttcttcggggcgaaaactctcaaggatcttaccgctgttgagatccagttcgatgtaacccactcgtgcacccaactgatcttcagcatcttttactttcaccagcgtttctgggtgagcaaaaacaggaaggcaaaatgccgcaaaaaagggaataagggcgacacggaaatgttgaatactcatactcttcctttttcattattattgaagcatttatcagggttattgtctcatgagcggatacatatttgaatgtatttagaaaaataaacaaataggggttccgcgcacatttccccgaaaagtgccacctgacgtcgacggatcgggagatctcccgatcccctatggtcgactctcagtacaatctgctctgatgccgcatagttaagccagtatctgctccctgcttgtgtgttggaggtcgctgagtagtgcgcgagcaaaatttaagctacaacaaggcaaggcttgaccgacaattgcatgaagaatctgcttagggttaggcgttttgcgctgcttcgcgatgtacgggccagatatacgcgagggcctatttcccatgattccttcatatttgcatatacgatacaaggctgttagagagataattagaattaatttgactgtaaacacaaagatattagtacaaaatacgtgacgtagaaagtaataatttcttgggtagtttgcagttttaaaattatgttttaaaatggactatcatatgcttaccgtaacttgaaagtatttcgatttcttggctttatatatcttgtggaaaggacgaaacaccgtaatacgactcactatagggtctagaattcctgtgaactgccgagtaggtagctgataacgcgaggtattcggctccgcgacggaggctaaggtgaactgccgagtaggtagctgataacgttgcagcggccgctttttttcttctgaggcggaaagaaccagctggggctctagggggtatccccacgcgccctgtagcggcgcattaagcgcggcgggtgtggtggttacgcgcagcgtgaccgctacacttgccagcgccctagcgcccgctcctttcgctttcttcccttcctttctcgccacgttcgccggctttccccgtcaagctctaaatcgggggctccctttagggttccgatttagtgctttacggcacctcgaccccaaaaaacttgattagggtgatggttcacgtagtgggccatcgccctgatagacggtttttcgccctttgacgttggagtccacgttctttaatagtggactcttgttccaaactggaacaacactcaaccctatctcggtctattcttttgatttataagggattttgccgatttcggcctattggttaaaaaatgagctgatttaacaaaaatttaacgcgaattaattctgtggaatgtgtgtcagttagggtgtggaaagtccccaggctccccagcaggcagaagtatgcaaagcatgcatctcaattagtcagcaaccaggtgtggaaagtccccaggctccccagcaggcagaagtatgcaaagcatgcatctcaattagtcagcaaccatagtcccgcccctaactccgcccatcccgcccctaactccgcccagttccgcccattctccgccccatggctgactaattttttttatttatgcagaggccgaggccgcctctgcctctgagctattccagaagtagtgaggaggcttttttggaggcctaggcttttgcaaaaagctcccgggagcttgtatatccattttcggatctgatcaagagacaggatgaggatcgtttcgcatgattgaacaagatggattgcacgcaggttctccggccgcttgggtggagaggctattcggctatgactgggcacaacagacaatcggctgctctgatgccgccgtgttccggctgtcagcgcaggggcgcccggttctttttgtcaagaccgacctgtccggtgccctgaatgaactgcaggacgaggcagcgcggctatcgtggctggccacgacgggcgttccttgcgcagctgtgctcgacgttgtcactgaagcgggaagggactggctgctattgggcgaagtgccggggcaggatctcctgtcatctcaccttgctcctgccgagaaagtatccatcatggctgatgcaatgcggcggctgcatacgcttgatccggctacctgcccattcgaccaccaagcgaaacatcgcatcgagcgagcacgtactcggatggaagccggtcttgtcgatcaggatgatctggacgaagagcatcaggggctcgcgccagccgaactgttcgccaggctcaaggcgcgcatgcccgacggcgaggatctcgtcgtgacccatggcgatgcctgcttgccgaatatcatggtggaaaatggccgcttttctggattcatcgactgtggccggctgggtgtggcggaccgctatcaggacatagcgttggctacccgtgatattgctgaagagcttggcggcgaatgggctgaccgcttcctcgtgctttacggtatcgccgctcccgattcgcagcgcatcgccttctatcgccttcttgacgagttcttctgagcgggactctggggttcgaaatgaccgaccaagcgacgcccaacctgccatcacgagatttcgattccaccgccgccttctatgaaaggttgggcttcggaatcgttttccgggacgccggctggatgatcctccagcgcggggatctcatgctggagttcttcgcccaccccaacttgtttattgcagcttataatggttacaaataaagcaatagcatcacaaatttcacaaataaagcatttttttcactgcattctagttgtggtttgtccaaactcatcaatgtatcttatcatgtctgtataccgtcgacctctagctagagcttggcgtaatcatggtcatagctgtttcctgtgtgaaattgttatccgctcacaattccacacaacatacgagccggaagcataaagtgtaaagcctggggtgcctaatgagtgagctaactcacattaattgcgttgcgctcactgcccgctttccagtcgggaaacctgtcgtgccagctgcattaatgaatcggccaacgcgcggggagaggcggtttgcgtattgggcgctcttccgcttcctcgctcactgactcgctgcgctcggtcgttcggctgcggcgagcggtatcagctcactcaaaggcggtaatacggttatccacagaatcaggggataacgcaggaaagaacatgtgagcaaaaggccagcaaaaggccaggaaccgtaaaaaggccgcgttgctggcgtttttccataggctccgcccccctgacgagcatcacaaaaatcgacgctcaagtcagaggtggcgaaacccgacaggactataaagataccaggcgtttccccctggaagctccctcgtgcgctctcctgttccgaccctgccgcttaccggatacctgtccgcctttctcccttcgggaagcgtggcgctttctcaatgctcacgctgtaggtatctcagttcggtgtaggtcgttcgctccaagctgggctgtgtgcacgaaccccccgttcagcccgaccgctgcgccttatccggtaactatcgtcttgagtccaacccggtaagacacgacttatcgccactggcagcagccactggtaacaggattagcagagcgaggtatgtaggcggtgctacagagttcttgaagtggtggcctaactacggctacactagaaggacagtatttggtatctgcgctctgctgaagccagttaccttcggaaaaagagttggtagctcttgatccggcaaacaaaccaccgctggtagcggtggtttttttgtttgcaagcagcagattacgcgcagaaaaaaaggatctcaagaagatcctttgatcttttctacggggtctgacgctcagtggaacgaaaactcacgttaagggattttggtcatgagattatcaaaaaggatcttcacctagatccttttaaattaaaaatgaagttttaaatcaatctaaagtatatatgagtaaacttggtctgacagttaccaatgcttaatcagtgaggcacctatctcagcgatctgtctatttcgttcatccatagttgcctgactccccgtcgtgtagataactacgatacgggagggcttaccatctggccccagtgctgcaatgataccgcgagacccacgctcaccggctccagatttatcagcaataaaccagccagccggaagggccgagcgcagaagtggtcctgcaactttatccgcctccatccagtctattaattgttgccgggaagctagagtaagtagttcgccagttaatagtttgcgcaacgttgttgccattgctacaggcatcgtggtgtcacgctcgtcgtttggtatggcttcattcagctccggttcccaacgatcaaggcgagttacatgatcccccatgttgtgcaaaaaagcggttagctccttcggtcctccgatcgttgtcagaagtaagttggccgcagtgttatcactcatggttatggcagcactgcataattctcttactgtcatgccatccgtaagatgcttttctgtgactggtgagtactcaaccaagtcattctgagaatagtgtatgcggcgaccgagttgctc

SEQ ID NO: 160 - DNA, 6017 bp, Artificial Sequence
  Synthetic
gacggatcgggagatctcccgatcccctatggtcgactctcagtacaatctgctctgatgccgcatagttaagccagtatctgctccctgcttgtgtgttggaggtcgctgagtagtgcgcgagcaaaatttaagctacaacaaggcaaggcttgaccgacaattgcatgaagaatctgcttagggttaggcgttttgcgctgcttcgcgatgtacgggccagatatacgcgttgacattgattattgactagttattaatagtaatcaattacggggtcattagttcatagcccatatatggagttccgcgttacataacttacggtaaatggcccgcctggctgaccgcccaacgacccccgcccattgacgtcaataatgacgtatgttcccatagtaacgccaatagggactttccattgacgtcaatgggtggactatttacggtaaactgcccacttggcagtacatcaagtgtatcatatgccaagtacgccccctattgacgtcaatgacggtaaatggcccgcctggcattatgcccagtacatgaccttatgggactttcctacttggcagtacatctacgtattagtcatcgctattaccatggtgatgcggttttggcagtacatcaatgggcgtggatagcggtttgactcacggggatttccaagtctccaccccattgacgtcaatgggagtttgttttggcaccaaaatcaacgggactttccaaaatgtcgtaacaactccgccccattgacgcaaatgggcggtaggcgtgtacggtgggaggtctatataagcagagctctctggctaactagagaacccactgcttactggcttatcgaaattaatacgactcactatagggagacccaagcttggtaccgagctcggatccctacttccaatccaatgccaccatgaagtggtactataagaccatcacattcctgcctgagctgtgcaacaatgagtctctggcagcaaagtgtctgcgggtgctgcacggcttcaattaccagtatgagacaagaaacatcggcgtgtcctttccactgtggtgcgacgccaccgtgggcaagaagatctctttcgtgagcaagaacaagatcgagctggatctgctgctgaagcagcactacttcgtgcagatggagcagctccagtattttcacatcagcaatacagtgctggtgcccgaggactgcacctacgtgagctttcggagatgtcagtccatcgataagctgaccgcagcaggactggcaagaaagatcaggcgcctggagaagcgggccctgtccagaggcgagcagttcgacccatctagctttgcccagaaggagcacacagccatcgcccactaccactctctgggcgagtcctctaagcagaccaatcggaacttcagactgaacatcaggatgctgagtgagcagccaagggagggcaattccatcttcagctcctatggcctgagcaattccgagaactcttttcagcccgtgcctctgatctaattacattggaagtggataatctagagggccctattctatagtgtcacctaaatgctagagctcgctgatcagcctcgactgtgccttctagttgccagccatctgttgtttgcccctcccccgtgccttccttgaccctggaaggtgccactcccactgtcctttcctaataaaatgaggaaattgcatcgcattgtctgagtaggtgtcattctattctggggggtggggtggggcaggacagcaagggggaggattgggaagacaatagcaggcatgctggggatgcggtgggctctatggcttctgaggcggaaagaaccagctggggctctagggggtatccccacgcgccctgtagcggcgcattaagcgcggcgggtgtggtggttacgcgcagcgtgaccgctacacttgccagcgccctagcgcccgctcctttcgctttcttcccttcctttctcgccacgttcgccggctttccccgtcaagctctaaatcggggcatccctttagggttccgatttagtgctttacggcacctcgaccccaaaaaacttgattagggtgatggttcacgtagtgggccatcgccctgatagacggtttttcgccctttgacgttggagtccacgttctttaatagtggactcttgttccaaactggaacaacactcaaccctatctcggtctattcttttgatttataagggattttggggatttcggcctattggttaaaaaatgagctgatttaacaaaaatttaacgcgaattaattctgtggaatgtgtgtcagttagggtgtggaaagtccccaggctccccaggcaggcagaagtatgcaaagcatgcatctcaattagtcagcaaccaggtgtggaaagtccccaggctccccagcaggcagaagtatgcaaagcatgcatctcaattagtcagcaaccatagtcccgcccctaactccgcccatcccgcccctaactccgcccagttccgcccattctccgccccatggctgactaattttttttatttatgcagaggccgaggccgcctctgcctctgagctattccagaagtagtgaggaggcttttttggaggcctaggcttttgcaaaaagctcccgggagcttgtatatccattttcggatctgatcaagagacaggatgaggatcgtttcgcatgattgaacaagatggattgcacgcaggttctccggccgcttgggtggagaggctattcggctatgactgggcacaacagacaatcggctgctctgatgccgccgtgttccggctgtcagcgcaggggcgcccggttctttttgtcaagaccgacctgtccggtgccctgaatgaactgcaggacgaggcagcgcggctatcgtggctggccacgacgggcgttccttgcgcagctgtgctcgacgttgtcactgaagcgggaagggactggctgctattgggcgaagtgccggggcaggatctcctgtcatctcaccttgctcctgccgagaaagtatccatcatggctgatgcaatgcggcggctgcatacgcttgatccggctacctgcccattcgaccaccaagcgaaacatcgcatcgagcgagcacgtactcggatggaagccggtcttgtcgatcaggatgatctggacgaagagcatcaggggctcgcgccagccgaactgttcgccaggctcaaggcgcgcatgcccgacggcgaggatctcgtcgtgacccatggcgatgcctgcttgccgaatatcatggtggaaaatggccgcttttctggattcatcgactgtggccggctgggtgtggcggaccgctatcaggacatagcgttggctacccgtgatattgctgaagagcttggcggcgaatgggctgaccgcttcctcgtgctttacggtatcgccgctcccgattcgcagcgcatcgccttctatcgccttcttgacgagttcttctgagcgggactctggggttcgaaatgaccgaccaagcgacgcccaacctgccatcacgagatttcgattccaccgccgccttctatgaaaggttgggcttcggaatcgttttccgggacgccggctggatgatcctccagcgcggggatctcatgctggagttcttcgcccaccccaacttgtttattgcagcttataatggttacaaataaagcaatagcatcacaaatttcacaaataaagcatttttttcactgcattctagttgtggtttgtccaaactcatcaatgtatcttatcatgtctgtataccgtcgacctctagctagagcttggcgtaatcatggtcatagctgtttcctgtgtgaaattgttatccgctcacaattccacacaacatacgagccggaagcataaagtgtaaagcctggggtgcctaatgagtgagctaactcacattaattgcgttgcgctcactgcccgctttccagtcgggaaacctgtcgtgccagctgcattaatgaatcggccaacgcgcggggagaggcggtttgcgtattgggcgctcttccgcttcctcgctcactgactcgctgcgctcggtcgttcggctgcggcgagcggtatcagctcactcaaaggcggtaatacggttatccacagaatcaggggataacgcaggaaagaacatgtgagcaaaaggccagcaaaaggccaggaaccgtaaaaaggccgcgttgctggcgtttttccataggctccgcccccctgacgagcatcacaaaaatcgacgctcaagtcagaggtggcgaaacccgacaggactataaagataccaggcgtttccccctggaagctccctcgtgcgctctcctgttccgaccctgccgcttaccggatacctgtccgcctttctcccttcgggaagcgtggcgctttctcaatgctcacgctgtaggtatctcagttcggtgtaggtcgttcgctccaagctgggctgtgtgcacgaaccccccgttcagcccgaccgctgcgccttatccggtaactatcgtcttgagtccaacccggtaagacacgacttatcgccactggcagcagccactggtaacaggattagcagagcgaggtatgtaggcggtgctacagagttcttgaagtggtggcctaactacggctacactagaaggacagtatttggtatctgcgctctgctgaagccagttaccttcggaaaaagagttggtagctcttgatccggcaaacaaaccaccgctggtagcggtggtttttttgtttgcaagcagcagattacgcgcagaaaaaaaggatctcaagaagatcctttgatcttttctacggggtctgacgctcagtggaacgaaaactcacgttaagggattttggtcatgagattatcaaaaaggatcttcacctagatccttttaaattaaaaatgaagttttaaatcaatctaaagtatatatgagtaaacttggtctgacagttaccaatgcttaatcagtgaggcacctatctcagcgatctgtctatttcgttcatccatagttgcctgactccccgtcgtgtagataactacgatacgggagggcttaccatctggccccagtgctgcaatgataccgcgagacccacgctcaccggctccagatttatcagcaataaaccagccagccggaagggccgagcgcagaagtggtcctgcaactttatccgcctccatccagtctattaattgttgccgggaagctagagtaagtagttcgccagttaatagtttgcgcaacgttgttgccattgctacaggcatcgtggtgtcacgctcgtcgtttggtatggcttcattcagctccggttcccaacgatcaaggcgagttacatgatcccccatgttgtgcaaaaaagcggttagctccttcggtcctccgatcgttgtcagaagtaagttggccgcagtgttatcactcatggttatggcagcactgcataattctcttactgtcatgccatccgtaagatgcttttctgtgactggtgagtactcaaccaagtcattctgagaatagtgtatgcggcgaccgagttgctcttgcccggcgtcaatacgggataataccgcgccacatagcagaactttaaaagtgctcatcattggaaaacgttcttcggggcgaaaactctcaaggatcttaccgctgttgagatccagttcgatgtaacccactcgtgcacccaactgatcttcagcatcttttactttcaccagcgtttctgggtgagcaaaaacaggaaggcaaaatgccgcaaaaaagggaataagggcgacacggaaatgttgaatactcatactcttcctttttcattattattgaagcatttatcagggttattgtctcatgagcggatacatatttgaatgtatttagaaaaataaacaaataggggttccgcgcacatttccccgaaaagtgccacctgacgtc

SEQ ID NO: 161 - DNA, 4801 bp, Artificial Sequence
  Synthetic
ttgcccggcgtcaatacgggataataccgcgccacatagcagaactttaaaagtgctcatcattggaaaacgttcttcggggcgaaaactctcaaggatcttaccgctgttgagatccagttcgatgtaacccactcgtgcacccaactgatcttcagcatcttttactttcaccagcgtttctgggtgagcaaaaacaggaaggcaaaatgccgcaaaaaagggaataagggcgacacggaaatgttgaatactcatactcttcctttttcattattattgaagcatttatcagggttattgtctcatgagcggatacatatttgaatgtatttagaaaaataaacaaataggggttccgcgcacatttccccgaaaagtgccacctgacgtcgacggatcgggagatctcccgatcccctatggtcgactctcagtacaatctgctctgatgccgcatagttaagccagtatctgctccctgcttgtgtgttggaggtcgctgagtagtgcgcgagcaaaatttaagctacaacaaggcaaggcttgaccgacaattgcatgaagaatctgcttagggttaggcgttttgcgctgcttcgcgatgtacgggccagatatacgcgagggcctatttcccatgattccttcatatttgcatatacgatacaaggctgttagagagataattagaattaatttgactgtaaacacaaagatattagtacaaaatacgtgacgtagaaagtaataatttcttgggtagtttgcagttttaaaattatgttttaaaatggactatcatatgcttaccgtaacttgaaagtatttcgatttcttggctttatatatcttgtggaaaggacgaaacaccgtaatacgactcactatagggtctagaattcctgtgaactgccgagtaggtagctgataacaatgcaggcaaatcaaccttagtctgaaggccgtgaactgccgagtaggtagctgataacgttgcagcggccgctttttttcttctgaggcggaaagaaccagctggggctctagggggtatccccacgcgccctgtagcggcgcattaagcgcggcgggtgtggtggttacgcgcagcgtgaccgctacacttgccagcgccctagcgcccgctcctttcgctttcttcccttcctttctcgccacgttcgccggctttccccgtcaagctctaaatcgggggctccctttagggttccgatttagtgctttacggcacctcgaccccaaaaaacttgattagggtgatggttcacgtagtgggccatcgccctgatagacggtttttcgccctttgacgttggagtccacgttctttaatagtggactcttgttccaaactggaacaacactcaaccctatctcggtctattcttttgatttataagggattttgccgatttcggcctattggttaaaaaatgagctgatttaacaaaaatttaacgcgaattaattctgtggaatgtgtgtcagttagggtgtggaaagtccccaggctccccagcaggcagaagtatgcaaagcatgcatctcaattagtcagcaaccaggtgtggaaagtccccaggctccccagcaggcagaagtatgcaaagcatgcatctcaattagtcagcaaccatagtcccgcccctaactccgcccatcccgcccctaactccgcccagttccgcccattctccgccccatggctgactaattttttttatttatgcagaggccgaggccgcctctgcctctgagctattccagaagtagtgaggaggcttttttggaggcctaggcttttgcaaaaagctcccgggagcttgtatatccattttcggatctgatcaagagacaggatgaggatcgtttcgcatgattgaacaagatggattgcacgcaggttctccggccgcttgggtggagaggctattcggctatgactgggcacaacagacaatcggctgctctgatgccgccgtgttccggctgtcagcgcaggggcgcccggttctttttgtcaagaccgacctgtccggtgccctgaatgaactgcaggacgaggcagcgcggctatcgtggctggccacgacgggcgttccttgcgcagctgtgctcgacgttgtcactgaagcgggaagggactggctgctattgggcgaagtgccggggcaggatctcctgtcatctcaccttgctcctgccgagaaagtatccatcatggctgatgcaatgcggcggctgcatacgcttgatccggctacctgcccattcgaccaccaagcgaaacatcgcatcgagcgagcacgtactcggatggaagccggtcttgtcgatcaggatgatctggacgaagagcatcaggggctcgcgccagccgaactgttcgccaggctcaaggcgcgcatgcccgacggcgaggatctcgtcgtgacccatggcgatgcctgcttgccgaatatcatggtggaaaatggccgcttttctggattcatcgactgtggccggctgggtgtggcggaccgctatcaggacatagcgttggctacccgtgatattgctgaagagcttggcggcgaatgggctgaccgcttcctcgtgctttacggtatcgccgctcccgattcgcagcgcatcgccttctatcgccttcttgacgagttcttctgagcgggactctggggttcgaaatgaccgaccaagcgacgcccaacctgccatcacgagatttcgattccaccgccgccttctatgaaaggttgggcttcggaatcgttttccgggacgccggctggatgatcctccagcgcggggatctcatgctggagttcttcgcccaccccaacttgtttattgcagcttataatggttacaaataaagcaatagcatcacaaatttcacaaataaagcatttttttcactgcattctagttgtggtttgtccaaactcatcaatgtatcttatcatgtctgtataccgtcgacctctagctagagcttggcgtaatcatggtcatagctgtttcctgtgtgaaattgttatccgctcacaattccacacaacatacgagccggaagcataaagtgtaaagcctggggtgcctaatgagtgagctaactcacattaattgcgttgcgctcactgcccgctttccagtcgggaaacctgtcgtgccagctgcattaatgaatcggccaacgcgcggggagaggcggtttgcgtattgggcgctcttccgcttcctcgctcactgactcgctgcgctcggtcgttcggctgcggcgagcggtatcagctcactcaaaggcggtaatacggttatccacagaatcaggggataacgcaggaaagaacatgtgagcaaaaggccagcaaaaggccaggaaccgtaaaaaggccgcgttgctggcgtttttccataggctccgcccccctgacgagcatcacaaaaatcgacgctcaagtcagaggtggcgaaacccgacaggactataaagataccaggcgtttccccctggaagctccctcgtgcgctctcctgttccgaccctgccgcttaccggatacctgtccgcctttctcccttcgggaagcgtggcgctttctcaatgctcacgctgtaggtatctcagttcggtgtaggtcgttcgctccaagctgggctgtgtgcacgaaccccccgttcagcccgaccgctgcgccttatccggtaactatcgtcttgagtccaacccggtaagacacgacttatcgccactggcagcagccactggtaacaggattagcagagcgaggtatgtaggcggtgctacagagttcttgaagtggtggcctaactacggctacactagaaggacagtatttggtatctgcgctctgctgaagccagttaccttcggaaaaagagttggtagctcttgatccggcaaacaaaccaccgctggtagcggtggtttttttgtttgcaagcagcagattacgcgcagaaaaaaaggatctcaagaagatcctttgatcttttctacggggtctgacgctcagtggaacgaaaactcacgttaagggattttggtcatgagattatcaaaaaggatcttcacctagatccttttaaattaaaaatgaagttttaaatcaatctaaagtatatatgagtaaacttggtctgacagttaccaatgcttaatcagtgaggcacctatctcagcgatctgtctatttcgttcatccatagttgcctgactccccgtcgtgtagataactacgatacgggagggcttaccatctggccccagtgctgcaatgataccgcgagacccacgctcaccggctccagatttatcagcaataaaccagccagccggaagggccgagcgcagaagtggtcctgcaactttatccgcctccatccagtctattaattgttgccgggaagctagagtaagtagttcgccagttaatagtttgcgcaacgttgttgccattgctacaggcatcgtggtgtcacgctcgtcgtttggtatggcttcattcagctccggttcccaacgatcaaggcgagttacatgatcccccatgttgtgcaaaaaagcggttagctccttcggtcctccgatcgttgtcagaagtaagttggccgcagtgttatcactcatggttatggcagcactgcataattctcttactgtcatgccatccgtaagatgcttttctgtgactggtgagtactcaaccaagtcattctgagaatagtgtatgcggcgaccgagttgctc

SEQ ID NO: 162 - DNA, 4609 bp, Artificial Sequence; identical to SEQ ID NO: 134
  Synthetic

SEQ ID NO: 163 - DNA, 6655 bp, Artificial Sequence
  Synthetic
gacggatcgggagatctcccgatcccctatggtcgactctcagtacaatctgctctgatgccgcatagttaagccagtatctgctccctgcttgtgtgttggaggtcgctgagtagtgcgcgagcaaaatttaagctacaacaaggcaaggcttgaccgacaattgcatgaagaatctgcttagggttaggcgttttgcgctgcttcgcgatgtacgggccagatatacgcgttgacattgattattgactagttattaatagtaatcaattacggggtcattagttcatagcccatatatggagttccgcgttacataacttacggtaaatggcccgcctggctgaccgcccaacgacccccgcccattgacgtcaataatgacgtatgttcccatagtaacgccaatagggactttccattgacgtcaatgggtggactatttacggtaaactgcccacttggcagtacatcaagtgtatcatatgccaagtacgccccctattgacgtcaatgacggtaaatggcccgcctggcattatgcccagtacatgaccttatgggactttcctacttggcagtacatctacgtattagtcatcgctattaccatggtgatgcggttttggcagtacatcaatgggcgtggatagcggtttgactcacggggatttccaagtctccaccccattgacgtcaatgggagtttgttttggcaccaaaatcaacgggactttccaaaatgtcgtaacaactccgccccattgacgcaaatgggcggtaggcgtgtacggtgggaggtctatataagcagagctctctggctaactagagaacccactgcttactggcttatcgaaattaatacgactcactatagggagacccaagcttggtaccgagctcggatccgccaccatgggcaaacggacagccgacggaagcgagttcgagtcaccgaaaaagaagcgaaaagttggctccggaatgttcctccagaggccaaagccctacagcgacgagtccctggagtctttctttatcagagtggccaataagaacggctatggcgatgtgcacaggttcctggaggccaccaagcggttcctccaggacatcgatcacaacggctaccagacctttccaacagacatcaccaggatcaatccctatagcgccaagaacagctcctctgcccgcacagcctccttcctgaagctggcccagctgacctttaatgagccacctgagctgctgggactggccatcaatcggacaaacatgaagtactccccttctaccagcgccgtggtgagaggagcagaggtgttcccacggtccctgctgagaacccacagcatcccatgctgtcccctgtgcctgagagagaacggctacgccagctatctgtggcacttccagggctacgagtattgtcactcccacaatgtgcctctgatcaccacatgctcttgtggcaaggagtttgactacagggtgagcggcctgaagggcatctgctgtaagtgcaaggagccaatcaccctgacaagccgcgagaatggccacgaggccgcctgtaccgtgtccaactggctggccggccacgagtctaagcctctgccaaacctgcccaagtcctatagatggggactggtgcactggtggatgggcatcaaggactccgagttcgatcacttctcttttgtgcagttctttagcaactggcctcggagcttccactccatcatcgaggacgaggtggagtttaatctggagcacgccgtggtgtccacctctgagctgcggctgaaggatctgctgggcagactgttctttggcagcatcaggctgccagagcgcaatctccagcacaacatcatcctgggcgagctgctgtgctacctggagaaccgcctgtggcaggacaagggcctgatcgccaatctgaagatgaacgccctggaggccacagtgatgctgaattgttccctggatcagatcgcctctatggtggagcagcgcatcctgaagcccaatagaaagtccaagcctaactctccactggacgtgaccgattacctgttccactttggcgacatcttctgcctgtggctggccgagtttcagtccgatgagttcaaccggagcttctacgtgagccggtggtaattacattggaagtggataatctagagggccctattctatagtgtcacctaaatgctagagctcgctgatcagcctcgactgtgccttctagttgccagccatctgttgtttgcccctcccccgtgccttccttgaccctggaaggtgccactcccactgtcctttcctaataaaatgaggaaattgcatcgcattgtctgagtaggtgtcattctattctggggggtggggtggggcaggacagcaagggggaggattgggaagacaatagcaggcatgctggggatgcggtgggctctatggcttctgaggcggaaagaaccagctggggctctagggggtatccccacgcgccctgtagcggcgcattaagcgcggcgggtgtggtggttacgcgcagcgtgaccgctacacttgccagcgccctagcgcccgctcctttcgctttcttcccttcctttctcgccacgttcgccggctttccccgtcaagctctaaatcggggcatccctttagggttccgatttagtgctttacggcacctcgaccccaaaaaacttgattagggtgatggttcacgtagtgggccatcgccctgatagacggtttttcgccctttgacgttggagtccacgttctttaatagtggactcttgttccaaactggaacaacactcaaccctatctcggtctattcttttgatttataagggattttggggatttcggcctattggttaaaaaatgagctgatttaacaaaaatttaacgcgaattaattctgtggaatgtgtgtcagttagggtgtggaaagtccccaggctccccaggcaggcagaagtatgcaaagcatgcatctcaattagtcagcaaccaggtgtggaaagtccccaggctccccagcaggcagaagtatgcaaagcatgcatctcaattagtcagcaaccatagtcccgcccctaactccgcccatcccgcccctaactccgcccagttccgcccattctccgccccatggctgactaattttttttatttatgcagaggccgaggccgcctctgcctctgagctattccagaagtagtgaggaggcttttttggaggcctaggcttttgcaaaaagctcccgggagcttgtatatccattttcggatctgatcaagagacaggatgaggatcgtttcgcatgattgaacaagatggattgcacgcaggttctccggccgcttgggtggagaggctattcggctatgactgggcacaacagacaatcggctgctctgatgccgccgtgttccggctgtcagcgcaggggcgcccggttctttttgtcaagaccgacctgtccggtgccctgaatgaactgcaggacgaggcagcgcggctatcgtggctggccacgacgggcgttccttgcgcagctgtgctcgacgttgtcactgaagcgggaagggactggctgctattgggcgaagtgccggggcaggatctcctgtcatctcaccttgctcctgccgagaaagtatccatcatggctgatgcaatgcggcggctgcatacgcttgatccggctacctgcccattcgaccaccaagcgaaacatcgcatcgagcgagcacgtactcggatggaagccggtcttgtcgatcaggatgatctggacgaagagcatcaggggctcgcgccagccgaactgttcgccaggctcaaggcgcgcatgcccgacggcgaggatctcgtcgtgacccatggcgatgcctgcttgccgaatatcatggtggaaaatggccgcttttctggattcatcgactgtggccggctgggtgtggcggaccgctatcaggacatagcgttggctacccgtgatattgctgaagagcttggcggcgaatgggctgaccgcttcctcgtgctttacggtatcgccgctcccgattcgcagcgcatcgccttctatcgccttcttgacgagttcttctgagcgggactctggggttcgaaatgaccgaccaagcgacgcccaacctgccatcacgagatttcgattccaccgccgccttctatgaaaggttgggcttcggaatcgttttccgggacgccggctggatgatcctccagcgcggggatctcatgctggagttcttcgcccaccccaacttgtttattgcagcttataatggttacaaataaagcaatagcatcacaaatttcacaaataaagcatttttttcactgcattctagttgtggtttgtccaaactcatcaatgtatcttatcatgtctgtataccgtcgacctctagctagagcttggcgtaatcatggtcatagctgtttcctgtgtgaaattgttatccgctcacaattccacacaacatacgagccggaagcataaagtgtaaagcctggggtgcctaatgagtgagctaactcacattaattgcgttgcgctcactgcccgctttccagtcgggaaacctgtcgtgccagctgcattaatgaatcggccaacgcgcggggagaggcggtttgcgtattgggcgctcttccgcttcctcgctcactgactcgctgcgctcggtcgttcggctgcggcgagcggtatcagctcactcaaaggcggtaatacggttatccacagaatcaggggataacgcaggaaagaacatgtgagcaaaaggccagcaaaaggccaggaaccgtaaaaaggccgcgttgctggcgtttttccataggctccgcccccctgacgagcatcacaaaaatcgacgctcaagtcagaggtggcgaaacccgacaggactataaagataccaggcgtttccccctggaagctccctcgtgcgctctcctgttccgaccctgccgcttaccggatacctgtccgcctttctcccttcgggaagcgtggcgctttctcaatgctcacgctgtaggtatctcagttcggtgtaggtcgttcgctccaagctgggctgtgtgcacgaaccccccgttcagcccgaccgctgcgccttatccggtaactatcgtcttgagtccaacccggtaagacacgacttatcgccactggcagcagccactggtaacaggattagcagagcgaggtatgtaggcggtgctacagagttcttgaagtggtggcctaactacggctacactagaaggacagtatttggtatctgcgctctgctgaagccagttaccttcggaaaaagagttggtagctcttgatccggcaaacaaaccaccgctggtagcggtggtttttttgtttgcaagcagcagattacgcgcagaaaaaaaggatctcaagaagatcctttgatcttttctacggggtctgacgctcagtggaacgaaaactcacgttaagggattttggtcatgagattatcaaaaaggatcttcacctagatccttttaaattaaaaatgaagttttaaatcaatctaaagtatatatgagtaaacttggtctgacagttaccaatgcttaatcagtgaggcacctatctcagcgatctgtctatttcgttcatccatagttgcctgactccccgtcgtgtagataactacgatacgggagggcttaccatctggccccagtgctgcaatgataccgcgagacccacgctcaccggctccagatttatcagcaataaaccagccagccggaagggccgagcgcagaagtggtcctgcaactttatccgcctccatccagtctattaattgttgccgggaagctagagtaagtagttcgccagttaatagtttgcgcaacgttgttgccattgctacaggcatcgtggtgtcacgctcgtcgtttggtatggcttcattcagctccggttcccaacgatcaaggcgagttacatgatcccccatgttgtgcaaaaaagcggttagctccttcggtcctccgatcgttgtcagaagtaagttggccgcagtgttatcactcatggttatggcagcactgcataattctcttactgtcatgccatccgtaagatgcttttctgtgactggtgagtactcaaccaagtcattctgagaatagtgtatgcggcgaccgagttgctcttgcccggcgtcaatacgggataataccgcgccacatagcagaactttaaaagtgctcatcattggaaaacgttcttcggggcgaaaactctcaaggatcttaccgctgttgagatccagttcgatgtaacccactcgtgcacccaactgatcttcagcatcttttactttcaccagcgtttctgggtgagcaaaaacaggaaggcaaaatgccgcaaaaaagggaataagggcgacacggaaatgttgaatactcatactcttcctttttcattattattgaagcatttatcagggttattgtctcatgagcggatacatatttgaatgtatttagaaaaataaacaaataggggttccgcgcacatttccccgaaaagtgccacctgacgtc

SEQ ID NO: 164 - DNA, 7393 bp, Artificial Sequence; identical to SEQ ID NO: 138
  Synthetic

SEQ ID NO: 165 - DNA, 6529 bp, Artificial Sequence
  Synthetic
gacggatcgggagatctcccgatcccctatggtcgactctcagtacaatctgctctgatgccgcatagttaagccagtatctgctccctgcttgtgtgttggaggtcgctgagtagtgcgcgagcaaaatttaagctacaacaaggcaaggcttgaccgacaattgcatgaagaatctgcttagggttaggcgttttgcgctgcttcgcgatgtacgggccagatatacgcgttgacattgattattgactagttattaatagtaatcaattacggggtcattagttcatagcccatatatggagttccgcgttacataacttacggtaaatggcccgcctggctgaccgcccaacgacccccgcccattgacgtcaataatgacgtatgttcccatagtaacgccaatagggactttccattgacgtcaatgggtggactatttacggtaaactgcccacttggcagtacatcaagtgtatcatatgccaagtacgccccctattgacgtcaatgacggtaaatggcccgcctggcattatgcccagtacatgaccttatgggactttcctacttggcagtacatctacgtattagtcatcgctattaccatggtgatgcggttttggcagtacatcaatgggcgtggatagcggtttgactcacggggatttccaagtctccaccccattgacgtcaatgggagtttgttttggcaccaaaatcaacgggactttccaaaatgtcgtaacaactccgccccattgacgcaaatgggcggtaggcgtgtacggtgggaggtctatataagcagagctctctggctaactagagaacccactgcttactggcttatcgaaattaatacgactcactatagggagacccaagcttggtaccgagctcggatccgccaccatgggcaaacggacagccgacggaagcgagttcgagtcaccgaaaaagaagcgaaaagttggctccggaatgaagctgccaaccaacctggcctacgagcggagcatcgaccccagcgacgtgtgcttcttcgtggtgtggccagacgataggaaaacccccctgacatacaattcccgcacactgctgggacagatggaggcagccagcctggcatacgacgtgtccggccagcctatcaagtctgccaccgcagaggccctggcacagggcaaccctcaccaggtggatttctgccatgtgccatacggcgccagccacatcgagtgtagcttctccgtgtcttttagctccgagctgcggcagccatataagtgtaattctagcaaggtgaagcagacactggtgcagctggtggagctgtacgaaaccaagatcggctggacagagctggccacccggtatctgatgaatatctgcaacggcaagtggctgtggaagaatacaagaaaggcctactgttggaacatcgtgctgaccccctggccttggaatggcgagaaagtgggcttcgaggacatcaggaccaactatacatcccgccaggacttcaagaacaataagaattggtctgccatcgtggagatgatcaagacagccttctcctctaccgacggcctggccatctttgaggtgagggccacactgcacctgccaaccaacgcaatggtgcgccctagccaggtgttcacagagaaggagagcggctccaagtctaagagcaagacccagaactctagggtgttccagagcaccacaatcgatggagagcggagcccaatcctgggagcctttaagacaggcgccgccatcgccaccatcgacgattggtatccagaggcaaccgagcctctgagggtgggccgctttggagtgcacagggaggacgtgacatgctacagacacccatctaccggcaaggatttctttagcatcctccagcaggccgagcactatatcgaggtgctgagtgccaacaagacacccgcccaggaaaccatcaatgacatgcacttcctgatggccaacctgatcaagggcggcatgtttcagcacaagggcgactaattacattggaagtggataatctagagggccctattctatagtgtcacctaaatgctagagctcgctgatcagcctcgactgtgccttctagttgccagccatctgttgtttgcccctcccccgtgccttccttgaccctggaaggtgccactcccactgtcctttcctaataaaatgaggaaattgcatcgcattgtctgagtaggtgtcattctattctggggggtggggtggggcaggacagcaagggggaggattgggaagacaatagcaggcatgctggggatgcggtgggctctatggcttctgaggcggaaagaaccagctggggctctagggggtatccccacgcgccctgtagcggcgcattaagcgcggcgggtgtggtggttacgcgcagcgtgaccgctacacttgccagcgccctagcgcccgctcctttcgctttcttcccttcctttctcgccacgttcgccggctttccccgtcaagctctaaatcggggcatccctttagggttccgatttagtgctttacggcacctcgaccccaaaaaacttgattagggtgatggttcacgtagtgggccatcgccctgatagacggtttttcgccctttgacgttggagtccacgttctttaatagtggactcttgttccaaactggaacaacactcaaccctatctcggtctattcttttgatttataagggattttggggatttcggcctattggttaaaaaatgagctgatttaacaaaaatttaacgcgaattaattctgtggaatgtgtgtcagttagggtgtggaaagtccccaggctccccaggcaggcagaagtatgcaaagcatgcatctcaattagtcagcaaccaggtgtggaaagtccccaggctccccagcaggcagaagtatgcaaagcatgcatctcaattagtcagcaaccatagtcccgcccctaactccgcccatcccgcccctaactccgcccagttccgcccattctccgccccatggctgactaattttttttatttatgcagaggccgaggccgcctctgcctctgagctattccagaagtagtgaggaggcttttttggaggcctaggcttttgcaaaaagctcccgggagcttgtatatccattttcggatctgatcaagagacaggatgaggatcgtttcgcatgattgaacaagatggattgcacgcaggttctccggccgcttgggtggagaggctattcggctatgactgggcacaacagacaatcggctgctctgatgccgccgtgttccggctgtcagcgcaggggcgcccggttctttttgtcaagaccgacctgtccggtgccctgaatgaactgcaggacgaggcagcgcggctatcgtggctggccacgacgggcgttccttgcgcagctgtgctcgacgttgtcactgaagcgggaagggactggctgctattgggcgaagtgccggggcaggatctcctgtcatctcaccttgctcctgccgagaaagtatccatcatggctgatgcaatgcggcggctgcatacgcttgatccggctacctgcccattcgaccaccaagcgaaacatcgcatcgagcgagcacgtactcggatggaagccggtcttgtcgatcaggatgatctggacgaagagcatcaggggctcgcgccagccgaactgttcgccaggctcaaggcgcgcatgcccgacggcgaggatctcgtcgtgacccatggcgatgcctgcttgccgaatatcatggtggaaaatggccgcttttctggattcatcgactgtggccggctgggtgtggcggaccgctatcaggacatagcgttggctacccgtgatattgctgaagagcttggcggcgaatgggctgaccgcttcctcgtgctttacggtatcgccgctcccgattcgcagcgcatcgccttctatcgccttcttgacgagttcttctgagcgggactctggggttcgaaatgaccgaccaagcgacgcccaacctgccatcacgagatttcgattccaccgccgccttctatgaaaggttgggcttcggaatcgttttccgggacgccggctggatgatcctccagcgcggggatctcatgctggagttcttcgcccaccccaacttgtttattgcagcttataatggttacaaataaagcaatagcatcacaaatttcacaaataaagcatttttttcactgcattctagttgtggtttgtccaaactcatcaatgtatcttatcatgtctgtataccgtcgacctctagctagagcttggcgtaatcatggtcatagctgtttcctgtgtgaaattgttatccgctcacaattccacacaacatacgagccggaagcataaagtgtaaagcctggggtgcctaatgagtgagctaactcacattaattgcgttgcgctcactgcccgctttccagtcgggaaacctgtcgtgccagctgcattaatgaatcggccaacgcgcggggagaggcggtttgcgtattgggcgctcttccgcttcctcgctcactgactcgctgcgctcggtcgttcggctgcggcgagcggtatcagctcactcaaaggcggtaatacggttatccacagaatcaggggataacgcaggaaagaacatgtgagcaaaaggccagcaaaaggccaggaaccgtaaaaaggccgcgttgctggcgtttttccataggctccgcccccctgacgagcatcacaaaaatcgacgctcaagtcagaggtggcgaaacccgacaggactataaagataccaggcgtttccccctggaagctccctcgtgcgctctcctgttccgaccctgccgcttaccggatacctgtccgcctttctcccttcgggaagcgtggcgctttctcaatgctcacgctgtaggtatctcagttcggtgtaggtcgttcgctccaagctgggctgtgtgcacgaaccccccgttcagcccgaccgctgcgccttatccggtaactatcgtcttgagtccaacccggtaagacacgacttatcgccactggcagcagccactggtaacaggattagcagagcgaggtatgtaggcggtgctacagagttcttgaagtggtggcctaactacggctacactagaaggacagtatttggtatctgcgctctgctgaagccagttaccttcggaaaaagagttggtagctcttgatccggcaaacaaaccaccgctggtagcggtggtttttttgtttgcaagcagcagattacgcgcagaaaaaaaggatctcaagaagatcctttgatcttttctacggggtctgacgctcagtggaacgaaaactcacgttaagggattttggtcatgagattatcaaaaaggatcttcacctagatccttttaaattaaaaatgaagttttaaatcaatctaaagtatatatgagtaaacttggtctgacagttaccaatgcttaatcagtgaggcacctatctcagcgatctgtctatttcgttcatccatagttgcctgactccccgtcgtgtagataactacgatacgggagggcttaccatctggccccagtgctgcaatgataccgcgagacccacgctcaccggctccagatttatcagcaataaaccagccagccggaagggccgagcgcagaagtggtcctgcaactttatccgcctccatccagtctattaattgttgccgggaagctagagtaagtagttcgccagttaatagtttgcgcaacgttgttgccattgctacaggcatcgtggtgtcacgctcgtcgtttggtatggcttcattcagctccggttcccaacgatcaaggcgagttacatgatcccccatgttgtgcaaaaaagcggttagctccttcggtcctccgatcgttgtcagaagtaagttggccgcagtgttatcactcatggttatggcagcactgcataattctcttactgtcatgccatccgtaagatgcttttctgtgactggtgagtactcaaccaagtcattctgagaatagtgtatgcggcgaccgagttgctcttgcccggcgtcaatacgggataataccgcgccacatagcagaactttaaaagtgctcatcattggaaaacgttcttcggggcgaaaactctcaaggatcttaccgctgttgagatccagttcgatgtaacccactcgtgcacccaactgatcttcagcatcttttactttcaccagcgtttctgggtgagcaaaaacaggaaggcaaaatgccgcaaaaaagggaataagggcgacacggaaatgttgaatactcatactcttcctttttcattattattgaagcatttatcagggttattgtctcatgagcggatacatatttgaatgtatttagaaaaataaacaaataggggttccgcgcacatttccccgaaaagtgccacctgacgtc

SEQ ID NO: 166 - DNA, 6070 bp, Artificial Sequence
  Synthetic
gacggatcgggagatctcccgatcccctatggtcgactctcagtacaatctgctctgatgccgcatagttaagccagtatctgctccctgcttgtgtgttggaggtcgctgagtagtgcgcgagcaaaatttaagctacaacaaggcaaggcttgaccgacaattgcatgaagaatctgcttagggttaggcgttttgcgctgcttcgcgatgtacgggccagatatacgcgttgacattgattattgactagttattaatagtaatcaattacggggtcattagttcatagcccatatatggagttccgcgttacataacttacggtaaatggcccgcctggctgaccgcccaacgacccccgcccattgacgtcaataatgacgtatgttcccatagtaacgccaatagggactttccattgacgtcaatgggtggactatttacggtaaactgcccacttggcagtacatcaagtgtatcatatgccaagtacgccccctattgacgtcaatgacggtaaatggcccgcctggcattatgcccagtacatgaccttatgggactttcctacttggcagtacatctacgtattagtcatcgctattaccatggtgatgcggttttggcagtacatcaatgggcgtggatagcggtttgactcacggggatttccaagtctccaccccattgacgtcaatgggagtttgttttggcaccaaaatcaacgggactttccaaaatgtcgtaacaactccgccccattgacgcaaatgggcggtaggcgtgtacggtgggaggtctatataagcagagctctctggctaactagagaacccactgcttactggcttatcgaaattaatacgactcactatagggagacccaagcttggtaccgagctcggatccgccaccatgggcaaacggacagccgacggaagcgagttcgagtcaccgaaaaagaagcgaaaagttggctccggagtgaagtggtactataagaccatcacattcctgcctgagctgtgcaacaatgagtctctggcagcaaagtgtctgcgggtgctgcacggcttcaattaccagtatgagacaagaaacatcggcgtgtcctttccactgtggtgcgacgccaccgtgggcaagaagatctctttcgtgagcaagaacaagatcgagctggatctgctgctgaagcagcactacttcgtgcagatggagcagctccagtattttcacatcagcaatacagtgctggtgcccgaggactgcacctacgtgagctttcggagatgtcagtccatcgataagctgaccgcagcaggactggcaagaaagatcaggcgcctggagaagcgggccctgtccagaggcgagcagttcgacccatctagctttgcccagaaggagcacacagccatcgcccactaccactctctgggcgagtcctctaagcagaccaatcggaacttcagactgaacatcaggatgctgagtgagcagccaagggagggcaattccatcttcagctcctatggcctgagcaattccgagaactcttttcagcccgtgcctctgatctaattacattggaagtggataatctagagggccctattctatagtgtcacctaaatgctagagctcgctgatcagcctcgactgtgccttctagttgccagccatctgttgtttgcccctcccccgtgccttccttgaccctggaaggtgccactcccactgtcctttcctaataaaatgaggaaattgcatcgcattgtctgagtaggtgtcattctattctggggggtggggtggggcaggacagcaagggggaggattgggaagacaatagcaggcatgctggggatgcggtgggctctatggcttctgaggcggaaagaaccagctggggctctagggggtatccccacgcgccctgtagcggcgcattaagcgcggcgggtgtggtggttacgcgcagcgtgaccgctacacttgccagcgccctagcgcccgctcctttcgctttcttcccttcctttctcgccacgttcgccggctttccccgtcaagctctaaatcggggcatccctttagggttccgatttagtgctttacggcacctcgaccccaaaaaacttgattagggtgatggttcacgtagtgggccatcgccctgatagacggtttttcgccctttgacgttggagtccacgttctttaatagtggactcttgttccaaactggaacaacactcaaccctatctcggtctattcttttgatttataagggattttggggatttcggcctattggttaaaaaatgagctgatttaacaaaaatttaacgcgaattaattctgtggaatgtgtgtcagttagggtgtggaaagtccccaggctccccaggcaggcagaagtatgcaaagcatgcatctcaattagtcagcaaccaggtgtggaaagtccccaggctccccagcaggcagaagtatgcaaagcatgcatctcaattagtcagcaaccatagtcccgcccctaactccgcccatcccgcccctaactccgcccagttccgcccattctccgccccatggctgactaattttttttatttatgcagaggccgaggccgcctctgcctctgagctattccagaagtagtgaggaggcttttttggaggcctaggcttttgcaaaaagctcccgggagcttgtatatccattttcggatctgatcaagagacaggatgaggatcgtttcgcatgattgaacaagatggattgcacgcaggttctccggccgcttgggtggagaggctattcggctatgactgggcacaacagacaatcggctgctctgatgccgccgtgttccggctgtcagcgcaggggcgcccggttctttttgtcaagaccgacctgtccggtgccctgaatgaactgcaggacgaggcagcgcggctatcgtggctggccacgacgggcgttccttgcgcagctgtgctcgacgttgtcactgaagcgggaagggactggctgctattgggcgaagtgccggggcaggatctcctgtcatctcaccttgctcctgccgagaaagtatccatcatggctgatgcaatgcggcggctgcatacgcttgatccggctacctgcccattcgaccaccaagcgaaacatcgcatcgagcgagcacgtactcggatggaagccggtcttgtcgatcaggatgatctggacgaagagcatcaggggctcgcgccagccgaactgttcgccaggctcaaggcgcgcatgcccgacggcgaggatctcgtcgtgacccatggcgatgcctgcttgccgaatatcatggtggaaaatggccgcttttctggattcatcgactgtggccggctgggtgtggcggaccgctatcaggacatagcgttggctacccgtgatattgctgaagagcttggcggcgaatgggctgaccgcttcctcgtgctttacggtatcgccgctcccgattcgcagcgcatcgccttctatcgccttcttgacgagttcttctgagcgggactctggggttcgaaatgaccgaccaagcgacgcccaacctgccatcacgagatttcgattccaccgccgccttctatgaaaggttgggcttcggaatcgttttccgggacgccggctggatgatcctccagcgcggggatctcatgctggagttcttcgcccaccccaacttgtttattgcagcttataatggttacaaataaagcaatagcatcacaaatttcacaaataaagcatttttttcactgcattctagttgtggtttgtccaaactcatcaatgtatcttatcatgtctgtataccgtcgacctctagctagagcttggcgtaatcatggtcatagctgtttcctgtgtgaaattgttatccgctcacaattccacacaacatacgagccggaagcataaagtgtaaagcctggggtgcctaatgagtgagctaactcacattaattgcgttgcgctcactgcccgctttccagtcgggaaacctgtcgtgccagctgcattaatgaatcggccaacgcgcggggagaggcggtttgcgtattgggcgctcttccgcttcctcgctcactgactcgctgcgctcggtcgttcggctgcggcgagcggtatcagctcactcaaaggcggtaatacggttatccacagaatcaggggataacgcaggaaagaacatgtgagcaaaaggccagcaaaaggccaggaaccgtaaaaaggccgcgttgctggcgtttttccataggctccgcccccctgacgagcatcacaaaaatcgacgctcaagtcagaggtggcgaaacccgacaggactataaagataccaggcgtttccccctggaagctccctcgtgcgctctcctgttccgaccctgccgcttaccggatacctgtccgcctttctcccttcgggaagcgtggcgctttctcaatgctcacgctgtaggtatctcagttcggtgtaggtcgttcgctccaagctgggctgtgtgcacgaaccccccgttcagcccgaccgctgcgccttatccggtaactatcgtcttgagtccaacccggtaagacacgacttatcgccactggcagcagccactggtaacaggattagcagagcgaggtatgtaggcggtgctacagagttcttgaagtggtggcctaactacggctacactagaaggacagtatttggtatctgcgctctgctgaagccagttaccttcggaaaaagagttggtagctcttgatccggcaaacaaaccaccgctggtagcggtggtttttttgtttgcaagcagcagattacgcgcagaaaaaaaggatctcaagaagatcctttgatcttttctacggggtctgacgctcagtggaacgaaaactcacgttaagggattttggtcatgagattatcaaaaaggatcttcacctagatccttttaaattaaaaatgaagttttaaatcaatctaaagtatatatgagtaaacttggtctgacagttaccaatgcttaatcagtgaggcacctatctcagcgatctgtctatttcgttcatccatagttgcctgactccccgtcgtgtagataactacgatacgggagggcttaccatctggccccagtgctgcaatgataccgcgagacccacgctcaccggctccagatttatcagcaataaaccagccagccggaagggccgagcgcagaagtggtcctgcaactttatccgcctccatccagtctattaattgttgccgggaagctagagtaagtagttcgccagttaatagtttgcgcaacgttgttgccattgctacaggcatcgtggtgtcacgctcgtcgtttggtatggcttcattcagctccggttcccaacgatcaaggcgagttacatgatcccccatgttgtgcaaaaaagcggttagctccttcggtcctccgatcgttgtcagaagtaagttggccgcagtgttatcactcatggttatggcagcactgcataattctcttactgtcatgccatccgtaagatgcttttctgtgactggtgagtactcaaccaagtcattctgagaatagtgtatgcggcgaccgagttgctcttgcccggcgtcaatacgggataataccgcgccacatagcagaactttaaaagtgctcatcattggaaaacgttcttcggggcgaaaactctcaaggatcttaccgctgttgagatccagttcgatgtaacccactcgtgcacccaactgatcttcagcatcttttactttcaccagcgtttctgggtgagcaaaaacaggaaggcaaaatgccgcaaaaaagggaataagggcgacacggaaatgttgaatactcatactcttcctttttcattattattgaagcatttatcagggttattgtctcatgagcggatacatatttgaatgtatttagaaaaataaacaaataggggttccgcgcacatttccccgaaaagtgccacctgacgtc

SEQ ID NO: 167 - DNA, 6659 bp, Artificial Sequence
  Synthetic
gacggatcgggagatctcccgatcccctatggtcgactctcagtacaatctgctctgatgccgcatagttaagccagtatctgctccctgcttgtgtgttggaggtcgctgagtagtgcgcgagcaaaatttaagctacaacaaggcaaggcttgaccgacaattgcatgaagaatctgcttagggttaggcgttttgcgctgcttcgcgatgtacgggccagatatacgcgttgacattgattattgactagttattaatagtaatcaattacggggtcattagttcatagcccatatatggagttccgcgttacataacttacggtaaatggcccgcctggctgaccgcccaacgacccccgcccattgacgtcaataatgacgtatgttcccatagtaacgccaatagggactttccattgacgtcaatgggtggactatttacggtaaactgcccacttggcagtacatcaagtgtatcatatgccaagtacgccccctattgacgtcaatgacggtaaatggcccgcctggcattatgcccagtacatgaccttatgggactttcctacttggcagtacatctacgtattagtcatcgctattaccatggtgatgcggttttggcagtacatcaatgggcgtggatagcggtttgactcacggggatttccaagtctccaccccattgacgtcaatgggagtttgttttggcaccaaaatcaacgggactttccaaaatgtcgtaacaactccgccccattgacgcaaatgggcggtaggcgtgtacggtgggaggtctatataagcagagctctctggctaactagagaacccactgcttactggcttatcgaaattaatacgactcactatagggagacccaagcttggtaccgagctcggatccctacttccaatccaatgccaccatgggctccgagacaagagaggcaaggatctctcgcgcaaagagggcctttgtgagcacaccctccgtgcgcaagatcctgtcctatatggatcgctgccgggacctgtccgatctggagtctgagcctacctgtatgatggtgtacggcgcctctggcgtgggcaagaccacagtgatcaagaagtatctgaatcagaataggagggagagcgaggcaggaggcgacatcatccccgtgctgcacatcgagctgcctgacaacgccaagccagtggatgccgccagagagctgctggtggagatgggcgaccctctggccctgtacgagacagatctggccagactgacaaagaggctgaccgagctgatcccagcagtgggagtgaagctgatcatcatcgatgagttccagcacctggtggaggagagaagcaacagggtgctgacacaagtgggcaactggctgaagatgatcctgaataagaccaagtgccctatcgtgatctttggcatgccatatagcaaggtggtgctccaggccaattctcagctgcacggcagattcagcatccaggtggagctgaggccattttcctaccagggaggaaggggcgtgttcaagacctttctggagtatctggacaaggccctgcccttcgagaagcaggcaggactggccaacgagtctctccagaagaagctgtacgccttttcccagggcaacatgcgctctctgcggaatctgatctatcaggcctccatcgaggccatcgacaatcagcacgaaaccatcacagaggaggatttcgtgtttgccagcaagctgacatccggcgacaagccaaacagctggaagaatcccttcgaggagggcgtggaggtgacagaggatatgctgcggccaccccccaaggacatcggctgggaggattacctgagacactccacccccagggtgtctaagcctggcagaaacaagaatttctttgagggctccggaaaacggacagccgacggaagcgagttcgagtcaccgaaaaagaagcgaaaagttggtggtagtggtggaagcggcgaggccagcggttccggacgggctgacgcattggacgattttgatctggatatgctgggaagtgacgccctcgatgattttgaccttgacatgcttggttcggatgcccttgatgactttgacctcgacatgctcggcagtgacgcccttgatgatttcgacctggacatgctgattaactctagataaagggccctattctatagtgtcacctaaatgctagagctcgctgatcagcctcgactgtgccttctagttgccagccatctgttgtttgcccctcccccgtgccttccttgaccctggaaggtgccactcccactgtcctttcctaataaaatgaggaaattgcatcgcattgtctgagtaggtgtcattctattctggggggtggggtggggcaggacagcaagggggaggattgggaagacaatagcaggcatgctggggatgcggtgggctctatggcttctgaggcggaaagaaccagctggggctctagggggtatccccacgcgccctgtagcggcgcattaagcgcggcgggtgtggtggttacgcgcagcgtgaccgctacacttgccagcgccctagcgcccgctcctttcgctttcttcccttcctttctcgccacgttcgccggctttccccgtcaagctctaaatcggggcatccctttagggttccgatttagtgctttacggcacctcgaccccaaaaaacttgattagggtgatggttcacgtagtgggccatcgccctgatagacggtttttcgccctttgacgttggagtccacgttctttaatagtggactcttgttccaaactggaacaacactcaaccctatctcggtctattcttttgatttataagggattttggggatttcggcctattggttaaaaaatgagctgatttaacaaaaatttaacgcgaattaattctgtggaatgtgtgtcagttagggtgtggaaagtccccaggctccccaggcaggcagaagtatgcaaagcatgcatctcaattagtcagcaaccaggtgtggaaagtccccaggctccccagcaggcagaagtatgcaaagcatgcatctcaattagtcagcaaccatagtcccgcccctaactccgcccatcccgcccctaactccgcccagttccgcccattctccgccccatggctgactaattttttttatttatgcagaggccgaggccgcctctgcctctgagctattccagaagtagtgaggaggcttttttggaggcctaggcttttgcaaaaagctcccgggagcttgtatatccattttcggatctgatcaagagacaggatgaggatcgtttcgcatgattgaacaagatggattgcacgcaggttctccggccgcttgggtggagaggctattcggctatgactgggcacaacagacaatcggctgctctgatgccgccgtgttccggctgtcagcgcaggggcgcccggttctttttgtcaagaccgacctgtccggtgccctgaatgaactgcaggacgaggcagcgcggctatcgtggctggccacgacgggcgttccttgcgcagctgtgctcgacgttgtcactgaagcgggaagggactggctgctattgggcgaagtgccggggcaggatctcctgtcatctcaccttgctcctgccgagaaagtatccatcatggctgatgcaatgcggcggctgcatacgcttgatccggctacctgcccattcgaccaccaagcgaaacatcgcatcgagcgagcacgtactcggatggaagccggtcttgtcgatcaggatgatctggacgaagagcatcaggggctcgcgccagccgaactgttcgccaggctcaaggcgcgcatgcccgacggcgaggatctcgtcgtgacccatggcgatgcctgcttgccgaatatcatggtggaaaatggccgcttttctggattcatcgactgtggccggctgggtgtggcggaccgctatcaggacatagcgttggctacccgtgatattgctgaagagcttggcggcgaatgggctgaccgcttcctcgtgctttacggtatcgccgctcccgattcgcagcgcatcgccttctatcgccttcttgacgagttcttctgagcgggactctggggttcgaaatgaccgaccaagcgacgcccaacctgccatcacgagatttcgattccaccgccgccttctatgaaaggttgggcttcggaatcgttttccgggacgccggctggatgatcctccagcgcggggatctcatgctggagttcttcgcccaccccaacttgtttattgcagcttataatggttacaaataaagcaatagcatcacaaatttcacaaataaagcatttttttcactgcattctagttgtggtttgtccaaactcatcaatgtatcttatcatgtctgtataccgtcgacctctagctagagcttggcgtaatcatggtcatagctgtttcctgtgtgaaattgttatccgctcacaattccacacaacatacgagccggaagcataaagtgtaaagcctggggtgcctaatgagtgagctaactcacattaattgcgttgcgctcactgcccgctttccagtcgggaaacctgtcgtgccagctgcattaatgaatcggccaacgcgcggggagaggcggtttgcgtattgggcgctcttccgcttcctcgctcactgactcgctgcgctcggtcgttcggctgcggcgagcggtatcagctcactcaaaggcggtaatacggttatccacagaatcaggggataacgcaggaaagaacatgtgagcaaaaggccagcaaaaggccaggaaccgtaaaaaggccgcgttgctggcgtttttccataggctccgcccccctgacgagcatcacaaaaatcgacgctcaagtcagaggtggcgaaacccgacaggactataaagataccaggcgtttccccctggaagctccctcgtgcgctctcctgttccgaccctgccgcttaccggatacctgtccgcctttctcccttcgggaagcgtggcgctttctcaatgctcacgctgtaggtatctcagttcggtgtaggtcgttcgctccaagctgggctgtgtgcacgaaccccccgttcagcccgaccgctgcgccttatccggtaactatcgtcttgagtccaacccggtaagacacgacttatcgccactggcagcagccactggtaacaggattagcagagcgaggtatgtaggcggtgctacagagttcttgaagtggtggcctaactacggctacactagaaggacagtatttggtatctgcgctctgctgaagccagttaccttcggaaaaagagttggtagctcttgatccggcaaacaaaccaccgctggtagcggtggtttttttgtttgcaagcagcagattacgcgcagaaaaaaaggatctcaagaagatcctttgatcttttctacggggtctgacgctcagtggaacgaaaactcacgttaagggattttggtcatgagattatcaaaaaggatcttcacctagatccttttaaattaaaaatgaagttttaaatcaatctaaagtatatatgagtaaacttggtctgacagttaccaatgcttaatcagtgaggcacctatctcagcgatctgtctatttcgttcatccatagttgcctgactccccgtcgtgtagataactacgatacgggagggcttaccatctggccccagtgctgcaatgataccgcgagacccacgctcaccggctccagatttatcagcaataaaccagccagccggaagggccgagcgcagaagtggtcctgcaactttatccgcctccatccagtctattaattgttgccgggaagctagagtaagtagttcgccagttaatagtttgcgcaacgttgttgccattgctacaggcatcgtggtgtcacgctcgtcgtttggtatggcttcattcagctccggttcccaacgatcaaggcgagttacatgatcccccatgttgtgcaaaaaagcggttagctccttcggtcctccgatcgttgtcagaagtaagttggccgcagtgttatcactcatggttatggcagcactgcataattctcttactgtcatgccatccgtaagatgcttttctgtgactggtgagtactcaaccaagtcattctgagaatagtgtatgcggcgaccgagttgctcttgcccggcgtcaatacgggataataccgcgccacatagcagaactttaaaagtgctcatcattggaaaacgttcttcggggcgaaaactctcaaggatcttaccgctgttgagatccagttcgatgtaacccactcgtgcacccaactgatcttcagcatcttttactttcaccagcgtttctgggtgagcaaaaacaggaaggcaaaatgccgcaaaaaagggaataagggcgacacggaaatgttgaatactcatactcttcctttttcattattattgaagcatttatcagggttattgtctcatgagcggatacatatttgaatgtatttagaaaaataaacaaataggggttccgcgcacatttccccgaaaagtgccacctgacgtc

SEQ ID NO: 168 - DNA, 6347 bp, Artificial Sequence
  Synthetic
gacggatcgggagatctcccgatcccctatggtgcactctcagtacaatctgctctgatgccgcatagttaagccagtatctgctccctgcttgtgtgttggaggtcgctgagtagtgcgcgagcaaaatttaagctacaacaaggcaaggcttgaccgacaattgcatgaagaatctgcttagggttaggcgttttgcgctgcttcgcgatgtacgggccagatatacgcgttgacattgattattgactagttattaatagtaatcaattacggggtcattagttcatagcccatatatggagttccgcgttacataacttacggtaaatggcccgcctggctgaccgcccaacgacccccgcccattgacgtcaataatgacgtatgttcccatagtaacgccaatagggactttccattgacgtcaatgggtggagtatttacggtaaactgcccacttggcagtacatcaagtgtatcatatgccaagtacgccccctattgacgtcaatgacggtaaatggcccgcctggcattatgcccagtacatgaccttatgggactttcctacttggcagtacatctacgtattagtcatcgctattaccatggtgatgcggttttggcagtacatcaatgggcgtggatagcggtttgactcacggggatttccaagtctccaccccattgacgtcaatgggagtttgttttggcaccaaaatcaacgggactttccaaaatgtcgtaacaactccgccccattgacgcaaatgggcggtaggcgtgtacggtgggaggtctatataagcagagctctctggctaactagagaacccactgcttactggcttatcgaaattaatacgactcactatagggagacccaagctggctagcgtttaaacttaagcttggtaccgagctcggatccgccaccatgggcaaacggacagccgacggaagcgagttcgagtcaccgaaaaagaagcgaaaagttggctccggagtgaagtggtactataagaccatcacattcctgcctgagctgtgcaacaatgagtctctggcagcaaagtgtctgcgggtgctgcacggcttcaattaccagtatgagacaagaaacatcggcgtgtcctttccactgtggtgcgacgccaccgtgggcaagaagatctctttcgtgagcaagaacaagatcgagctggatctgctgctgaagcagcactacttcgtgcagatggagcagctccagtattttcacatcagcaatacagtgctggtgcccgaggactgcacctacgtgagctttcggagatgtcagtccatcgataagctgaccgcagcaggactggcaagaaagatcaggcgcctggagaagcgggccctgtccagaggcgagcagttcgacccatctagctttgcccagaaggagcacacagccatcgcccactaccactctctgggcgagtcctctaagcagaccaatcggaacttcagactgaacatcaggatgctgagtgagcagccaagggagggcaattccatcttcagctcctatggcctgagcaattccgagaactcttttcagcccgtgcctctgatctaattacattggaagtggataatctagaagggccctattctatagtgtgattcgtcagtagggttgtaaaggtttttcttttcctgagaaaacaaccttttgttttctcaggttttgctttttggcctttccctagctttaaaaaaaaaaaagcaaaactcaccgaggcagttccataggatggcaagatcctggtatgcgagaattcctgtgaactgccgagtaggtagctgataacaatgcaggcaaatcaaccttagtctgaaggccgtgaactgccgagtaggtagctgataacgtagcggccgcgggcccgtttaaacccgctgatcagcctcgactgtgccttctagttgccagccatctgttgtttgcccctcccccgtgccttccttgaccctggaaggtgccactcccactgtcctttcctaataaaatgaggaaattgcatcgcattgtctgagtaggtgtcattctattctggggggtggggtggggcaggacagcaagggggaggattgggaagacaatagcaggcatgctggggatgcggtgggctctatggcttctgaggcggaaagaaccagctggggctctagggggtatccccacgcgccctgtagcggcgcattaagcgcggcgggtgtggtggttacgcgcagcgtgaccgctacacttgccagcgccctagcgcccgctcctttcgctttcttcccttcctttctcgccacgttcgccggctttccccgtcaagctctaaatcgggggctccctttagggttccgatttagtgctttacggcacctcgaccccaaaaaacttgattagggtgatggttcacgtagtgggccatcgccctgatagacggtttttcgccctttgacgttggagtccacgttctttaatagtggactcttgttccaaactggaacaacactcaaccctatctcggtctattcttttgatttataagggattttgccgatttcggcctattggttaaaaaatgagctgatttaacaaaaatttaacgcgaattaattctgtggaatgtgtgtcagttagggtgtggaaagtccccaggctccccagcaggcagaagtatgcaaagcatgcatctcaattagtcagcaaccaggtgtggaaagtccccaggctccccagcaggcagaagtatgcaaagcatgcatctcaattagtcagcaaccatagtcccgcccctaactccgcccatcccgcccctaactccgcccagttccgcccattctccgccccatggctgactaattttttttatttatgcagaggccgaggccgcctctgcctctgagctattccagaagtagtgaggaggcttttttggaggcctaggcttttgcaaaaagctcccgggagcttgtatatccattttcggatctgatcaagagacaggatgaggatcgtttcgcatgattgaacaagatggattgcacgcaggttctccggccgcttgggtggagaggctattcggctatgactgggcacaacagacaatcggctgctctgatgccgccgtgttccggctgtcagcgcaggggcgcccggttctttttgtcaagaccgacctgtccggtgccctgaatgaactgcaggacgaggcagcgcggctatcgtggctggccacgacgggcgttccttgcgcagctgtgctcgacgttgtcactgaagcgggaagggactggctgctattgggcgaagtgccggggcaggatctcctgtcatctcaccttgctcctgccgagaaagtatccatcatggctgatgcaatgcggcggctgcatacgcttgatccggctacctgcccattcgaccaccaagcgaaacatcgcatcgagcgagcacgtactcggatggaagccggtcttgtcgatcaggatgatctggacgaagagcatcaggggctcgcgccagccgaactgttcgccaggctcaaggcgcgcatgcccgacggcgaggatctcgtcgtgacccatggcgatgcctgcttgccgaatatcatggtggaaaatggccgcttttctggattcatcgactgtggccggctgggtgtggcggaccgctatcaggacatagcgttggctacccgtgatattgctgaagagcttggcggcgaatgggctgaccgcttcctcgtgctttacggtatcgccgctcccgattcgcagcgcatcgccttctatcgccttcttgacgagttcttctgagcgggactctggggttcgaaatgaccgaccaagcgacgcccaacctgccatcacgagatttcgattccaccgccgccttctatgaaaggttgggcttcggaatcgttttccgggacgccggctggatgatcctccagcgcggggatctcatgctggagttcttcgcccaccccaacttgtttattgcagcttataatggttacaaataaagcaatagcatcacaaatttcacaaataaagcatttttttcactgcattctagttgtggtttgtccaaactcatcaatgtatcttatcatgtctgtataccgtcgacctctagctagagcttggcgtaatcatggtcatagctgtttcctgtgtgaaattgttatccgctcacaattccacacaacatacgagccggaagcataaagtgtaaagcctggggtgcctaatgagtgagctaactcacattaattgcgttgcgctcactgcccgctttccagtcgggaaacctgtcgtgccagctgcattaatgaatcggccaacgcgcggggagaggcggtttgcgtattgggcgctcttccgcttcctcgctcactgactcgctgcgctcggtcgttcggctgcggcgagcggtatcagctcactcaaaggcggtaatacggttatccacagaatcaggggataacgcaggaaagaacatgtgagcaaaaggccagcaaaaggccaggaaccgtaaaaaggccgcgttgctggcgtttttccataggctccgcccccctgacgagcatcacaaaaatcgacgctcaagtcagaggtggcgaaacccgacaggactataaagataccaggcgtttccccctggaagctccctcgtgcgctctcctgttccgaccctgccgcttaccggatacctgtccgcctttctcccttcgggaagcgtggcgctttctcatagctcacgctgtaggtatctcagttcggtgtaggtcgttcgctccaagctgggctgtgtgcacgaaccccccgttcagcccgaccgctgcgccttatccggtaactatcgtcttgagtccaacccggtaagacacgacttatcgccactggcagcagccactggtaacaggattagcagagcgaggtatgtaggcggtgctacagagttcttgaagtggtggcctaactacggctacactagaagaacagtatttggtatctgcgctctgctgaagccagttaccttcggaaaaagagttggtagctcttgatccggcaaacaaaccaccgctggtagcggtttttttgtttgcaagcagcagattacgcgcagaaaaaaaggatctcaagaagatcctttgatcttttctacggggtctgacgctcagtggaacgaaaactcacgttaagggattttggtcatgagattatcaaaaaggatcttcacctagatccttttaaattaaaaatgaagttttaaatcaatctaaagtatatatgagtaaacttggtctgacagttaccaatgcttaatcagtgaggcacctatctcagcgatctgtctatttcgttcatccatagttgcctgactccccgtcgtgtagataactacgatacgggagggcttaccatctggccccagtgctgcaatgataccgcgagacccacgctcaccggctccagatttatcagcaataaaccagccagccggaagggccgagcgcagaagtggtcctgcaactttatccgcctccatccagtctattaattgttgccgggaagctagagtaagtagttcgccagttaatagtttgcgcaacgttgttgccattgctacaggcatcgtggtgtcacgctcgtcgtttggtatggcttcattcagctccggttcccaacgatcaaggcgagttacatgatcccccatgttgtgcaaaaaagcggttagctccttcggtcctccgatcgttgtcagaagtaagttggccgcagtgttatcactcatggttatggcagcactgcataattctcttactgtcatgccatccgtaagatgcttttctgtgactggtgagtactcaaccaagtcattctgagaatagtgtatgcggcgaccgagttgctcttgcccggcgtcaatacgggataataccgcgccacatagcagaactttaaaagtgctcatcattggaaaacgttcttcggggcgaaaactctcaaggatcttaccgctgttgagatccagttcgatgtaacccactcgtgcacccaactgatcttcagcatcttttactttcaccagcgtttctgggtgagcaaaaacaggaaggcaaaatgccgcaaaaaagggaataagggcgacacggaaatgttgaatactcatactcttcctttttcaatattattgaagcatttatcagggttattgtctcatgagcggatacatatttgaatgtatttagaaaaataaacaaataggggttccgcgcacatttccccgaaaagtgccacctgacgtc

SEQ ID NO: 169 - DNA, 6806 bp, Artificial Sequence
  Synthetic
gacggatcgggagatctcccgatcccctatggtgcactctcagtacaatctgctctgatgccgcatagttaagccagtatctgctccctgcttgtgtgttggaggtcgctgagtagtgcgcgagcaaaatttaagctacaacaaggcaaggcttgaccgacaattgcatgaagaatctgcttagggttaggcgttttgcgctgcttcgcgatgtacgggccagatatacgcgttgacattgattattgactagttattaatagtaatcaattacggggtcattagttcatagcccatatatggagttccgcgttacataacttacggtaaatggcccgcctggctgaccgcccaacgacccccgcccattgacgtcaataatgacgtatgttcccatagtaacgccaatagggactttccattgacgtcaatgggtggagtatttacggtaaactgcccacttggcagtacatcaagtgtatcatatgccaagtacgccccctattgacgtcaatgacggtaaatggcccgcctggcattatgcccagtacatgaccttatgggactttcctacttggcagtacatctacgtattagtcatcgctattaccatggtgatgcggttttggcagtacatcaatgggcgtggatagcggtttgactcacggggatttccaagtctccaccccattgacgtcaatgggagtttgttttggcaccaaaatcaacgggactttccaaaatgtcgtaacaactccgccccattgacgcaaatgggcggtaggcgtgtacggtgggaggtctatataagcagagctctctggctaactagagaacccactgcttactggcttatcgaaattaatacgactcactatagggagacccaagctggctagcgtttaaacttaagcttggtaccgagctcggatccgccaccatgggcaaacggacagccgacggaagcgagttcgagtcaccgaaaaagaagcgaaaagttggctccggaatgaagctgccaaccaacctggcctacgagcggagcatcgaccccagcgacgtgtgcttcttcgtggtgtggccagacgataggaaaacccccctgacatacaattcccgcacactgctgggacagatggaggcagccagcctggcatacgacgtgtccggccagcctatcaagtctgccaccgcagaggccctggcacagggcaaccctcaccaggtggatttctgccatgtgccatacggcgccagccacatcgagtgtagcttctccgtgtcttttagctccgagctgcggcagccatataagtgtaattctagcaaggtgaagcagacactggtgcagctggtggagctgtacgaaaccaagatcggctggacagagctggccacccggtatctgatgaatatctgcaacggcaagtggctgtggaagaatacaagaaaggcctactgttggaacatcgtgctgaccccctggccttggaatggcgagaaagtgggcttcgaggacatcaggaccaactatacatcccgccaggacttcaagaacaataagaattggtctgccatcgtggagatgatcaagacagccttctcctctaccgacggcctggccatctttgaggtgagggccacactgcacctgccaaccaacgcaatggtgcgccctagccaggtgttcacagagaaggagagcggctccaagtctaagagcaagacccagaactctagggtgttccagagcaccacaatcgatggagagcggagcccaatcctgggagcctttaagacaggcgccgccatcgccaccatcgacgattggtatccagaggcaaccgagcctctgagggtgggccgctttggagtgcacagggaggacgtgacatgctacagacacccatctaccggcaaggatttctttagcatcctccagcaggccgagcactatatcgaggtgctgagtgccaacaagacacccgcccaggaaaccatcaatgacatgcacttcctgatggccaacctgatcaagggcggcatgtttcagcacaagggcgactaattacattggaagtggataatctagaagggccctattctatagtgtgattcgtcagtagggttgtaaaggtttttcttttcctgagaaaacaaccttttgttttctcaggttttgctttttggcctttccctagctttaaaaaaaaaaaagcaaaactcaccgaggcagttccataggatggcaagatcctggtatgcgagaattcctgtgaactgccgagtaggtagctgataacaatgcaggcaaatcaaccttagtctgaaggccgtgaactgccgagtaggtagctgataacgtagcggccgcgggcccgtttaaacccgctgatcagcctcgactgtgccttctagttgccagccatctgttgtttgcccctcccccgtgccttccttgaccctggaaggtgccactcccactgtcctttcctaataaaatgaggaaattgcatcgcattgtctgagtaggtgtcattctattctggggggtggggtggggcaggacagcaagggggaggattgggaagacaatagcaggcatgctggggatgcggtgggctctatggcttctgaggcggaaagaaccagctggggctctagggggtatccccacgcgccctgtagcggcgcattaagcgcggcgggtgtggtggttacgcgcagcgtgaccgctacacttgccagcgccctagcgcccgctcctttcgctttcttcccttcctttctcgccacgttcgccggctttccccgtcaagctctaaatcgggggctccctttagggttccgatttagtgctttacggcacctcgaccccaaaaaacttgattagggtgatggttcacgtagtgggccatcgccctgatagacggtttttcgccctttgacgttggagtccacgttctttaatagtggactcttgttccaaactggaacaacactcaaccctatctcggtctattcttttgatttataagggattttgccgatttcggcctattggttaaaaaatgagctgatttaacaaaaatttaacgcgaattaattctgtggaatgtgtgtcagttagggtgtggaaagtccccaggctccccagcaggcagaagtatgcaaagcatgcatctcaattagtcagcaaccaggtgtggaaagtccccaggctccccagcaggcagaagtatgcaaagcatgcatctcaattagtcagcaaccatagtcccgcccctaactccgcccatcccgcccctaactccgcccagttccgcccattctccgccccatggctgactaattttttttatttatgcagaggccgaggccgcctctgcctctgagctattccagaagtagtgaggaggcttttttggaggcctaggcttttgcaaaaagctcccgggagcttgtatatccattttcggatctgatcaagagacaggatgaggatcgtttcgcatgattgaacaagatggattgcacgcaggttctccggccgcttgggtggagaggctattcggctatgactgggcacaacagacaatcggctgctctgatgccgccgtgttccggctgtcagcgcaggggcgcccggttctttttgtcaagaccgacctgtccggtgccctgaatgaactgcaggacgaggcagcgcggctatcgtggctggccacgacgggcgttccttgcgcagctgtgctcgacgttgtcactgaagcgggaagggactggctgctattgggcgaagtgccggggcaggatctcctgtcatctcaccttgctcctgccgagaaagtatccatcatggctgatgcaatgcggcggctgcatacgcttgatccggctacctgcccattcgaccaccaagcgaaacatcgcatcgagcgagcacgtactcggatggaagccggtcttgtcgatcaggatgatctggacgaagagcatcaggggctcgcgccagccgaactgttcgccaggctcaaggcgcgcatgcccgacggcgaggatctcgtcgtgacccatggcgatgcctgcttgccgaatatcatggtggaaaatggccgcttttctggattcatcgactgtggccggctgggtgtggcggaccgctatcaggacatagcgttggctacccgtgatattgctgaagagcttggcggcgaatgggctgaccgcttcctcgtgctttacggtatcgccgctcccgattcgcagcgcatcgccttctatcgccttcttgacgagttcttctgagcgggactctggggttcgaaatgaccgaccaagcgacgcccaacctgccatcacgagatttcgattccaccgccgccttctatgaaaggttgggcttcggaatcgttttccgggacgccggctggatgatcctccagcgcggggatctcatgctggagttcttcgcccaccccaacttgtttattgcagcttataatggttacaaataaagcaatagcatcacaaatttcacaaataaagcatttttttcactgcattctagttgtggtttgtccaaactcatcaatgtatcttatcatgtctgtataccgtcgacctctagctagagcttggcgtaatcatggtcatagctgtttcctgtgtgaaattgttatccgctcacaattccacacaacatacgagccggaagcataaagtgtaaagcctggggtgcctaatgagtgagctaactcacattaattgcgttgcgctcactgcccgctttccagtcgggaaacctgtcgtgccagctgcattaatgaatcggccaacgcgcggggagaggcggtttgcgtattgggcgctcttccgcttcctcgctcactgactcgctgcgctcggtcgttcggctgcggcgagcggtatcagctcactcaaaggcggtaatacggttatccacagaatcaggggataacgcaggaaagaacatgtgagcaaaaggccagcaaaaggccaggaaccgtaaaaaggccgcgttgctggcgtttttccataggctccgcccccctgacgagcatcacaaaaatcgacgctcaagtcagaggtggcgaaacccgacaggactataaagataccaggcgtttccccctggaagctccctcgtgcgctctcctgttccgaccctgccgcttaccggatacctgtccgcctttctcccttcgggaagcgtggcgctttctcatagctcacgctgtaggtatctcagttcggtgtaggtcgttcgctccaagctgggctgtgtgcacgaaccccccgttcagcccgaccgctgcgccttatccggtaactatcgtcttgagtccaacccggtaagacacgacttatcgccactggcagcagccactggtaacaggattagcagagcgaggtatgtaggcggtgctacagagttcttgaagtggtggcctaactacggctacactagaagaacagtatttggtatctgcgctctgctgaagccagttaccttcggaaaaagagttggtagctcttgatccggcaaacaaaccaccgctggtagcggtttttttgtttgcaagcagcagattacgcgcagaaaaaaaggatctcaagaagatcctttgatcttttctacggggtctgacgctcagtggaacgaaaactcacgttaagggattttggtcatgagattatcaaaaaggatcttcacctagatccttttaaattaaaaatgaagttttaaatcaatctaaagtatatatgagtaaacttggtctgacagttaccaatgcttaatcagtgaggcacctatctcagcgatctgtctatttcgttcatccatagttgcctgactccccgtcgtgtagataactacgatacgggagggcttaccatctggccccagtgctgcaatgataccgcgagacccacgctcaccggctccagatttatcagcaataaaccagccagccggaagggccgagcgcagaagtggtcctgcaactttatccgcctccatccagtctattaattgttgccgggaagctagagtaagtagttcgccagttaatagtttgcgcaacgttgttgccattgctacaggcatcgtggtgtcacgctcgtcgtttggtatggcttcattcagctccggttcccaacgatcaaggcgagttacatgatcccccatgttgtgcaaaaaagcggttagctccttcggtcctccgatcgttgtcagaagtaagttggccgcagtgttatcactcatggttatggcagcactgcataattctcttactgtcatgccatccgtaagatgcttttctgtgactggtgagtactcaaccaagtcattctgagaatagtgtatgcggcgaccgagttgctcttgcccggcgtcaatacgggataataccgcgccacatagcagaactttaaaagtgctcatcattggaaaacgttcttcggggcgaaaactctcaaggatcttaccgctgttgagatccagttcgatgtaacccactcgtgcacccaactgatcttcagcatcttttactttcaccagcgtttctgggtgagcaaaaacaggaaggcaaaatgccgcaaaaaagggaataagggcgacacggaaatgttgaatactcatactcttcctttttcaatattattgaagcatttatcagggttattgtctcatgagcggatacatatttgaatgtatttagaaaaataaacaaataggggttccgcgcacatttccccgaaaagtgccacctgacgtc

SEQ ID NO: 170 - DNA, 5719 bp, Artificial Sequence
  Synthetic
accccgtagaaaagatcaaaggatcttcttgagatcctttttttctgcgcgtaatctgctgcttgcaaacaaaaaaaccaccgctaccagcggtggtttgtttgccggatcaagagctaccaactctttttccgaaggtaactggcttcagcagagcgcagataccaaatactgttcttctagtgtagccgtagttaggccaccacttcaagaactctgtagcaccgcctacatacctcgctctgctaatcctgttaccagtggctgctgccagtggcgataagtcgtgtcttaccgggttggactcaagacgatagttaccggataaggcgcagcggtcgggctgaacggggggttcgtgcacacagcccagcttggagcgaacgacctacaccgaactgagatacctacagcgtgagctatgagaaagcgccacgcttcccgaagggagaaaggcggacaggtatccggtaagcggcagggtcggaacaggagagcgcacgagggagcttccagggggaaacgcctggtatctttatagtcctgtcgggtttcgccacctctgacttgagcgtcgatttttgtgatgctcgtcaggggggcggagcctatggaaaaacgccagcaacgcggcctttttacggttcctggccttttgctggccttttgctcacatgttctttcctgcgttatcccctgattctgtggataaccgtattaccgcctttgagtgagctgataccgctcgccgcagccgaacgaccgagcgcagcgagtcagtgagcgaggaagcggaagagcgcccaatacgcaaaccgcctctccccgcgcgttggccgattcattaatgcagctggcacgacaggtttcccgactggaaagcgggcagtgagcgcaacgcaattaatgtgagttagctcactcattaggcaccccaggctttacactttatgcttccggctcgtatgttgtgtggaattgtgagcggataacaatttcacacaggaaacagctatgaccatgattacgccaagctttgttgatacaaccataaaatgataattacacccataaattgataattatcacacccataaattgatattgcctcttcatggtctaaacttcagtaagtttacgacattttcatgaagaggtcatttccgggcggcctattggttaaaaaatgagctgatttaacaaaaatttaacgcgaattaattgacattgattattgactagttattaatagtaatcaattacggggtcattagttcatagcccatatatggagttccgcgttacataacttacggtaaatggcccgcctggctgaccgcccaacgacccccgcccattgacgtcaataatgacgtatgttcccatagtaacgccaatagggactttccattgacgtcaatgggtggagtatttacggtaaactgcccacttggcagtacatcaagtgtatcatatgccaagtacgccccctattgacgtcaatgacggtaaatggcccgcctggcattatgcccagtacatgaccttatgggactttcctacttggcagtacatctacgtattagtcatcgctattaccatggtgatgcggttttggcagtacatcaatgggcgtggatagcggtttgactcacggggatttccaagtctccaccccattgacgtcaatgggagtttgttttggcaccaaaatcaacgggactttccaaaatgtcgtaacaactccgccccattgacgcaaatgggcggtaggcgtgtacggtgggaggtctatataagcagagctctctggctaactagagaacccactgcttactggcttatcgaaattaatagcactggacatcacgaagcttaccggtagccaccatgaccgagtacaagcccacggtgcgcctcgccacccgcgacgacgtccccagggccgtacgcaccctcgccgccgcgttcgccgactaccccgccacgcgccacaccgtcgatccggaccgccacatcgagcgggtcaccgagctgcaagaactcttcctcacgcgcgtcgggctcgacatcggcaaggtgtgggtcgcggacgacggcgccgcggtggcggtctggaccacgccggagagcgtcgaagcgggggcggtgttcgccgagatcggcccgcgcatggccgagttgagcggttcccggctggccgcgcagcaacagatggaaggcctcctggcgccgcaccggcccaaggagcccgcgtggttcctggccaccgtcggagtctcgcccgaccaccagggcaagggtctgggcagcgccgtcgtgctccccggagtggaggcggccgagcgcgccggggtgcccgccttcctggagacctccgcgccccgcaacctccccttctacgagcggctcggcttcaccgtcaccgccgacgtcgaggtgcccgaaggaccgcgcacctggtgcatgacccgcaagcccggtgccggcagtggagagggcagaggaagtctgctaacatgcggtgacgtcgaggagaatcctggcccagtgagcaagggcgaggagctgttcaccggggtggtgcccatcctggtcgagctggacggcgacgtaaacggccacaagttcagcgtgtccggcgagggcgagggcgatgccacctacggcaagctgaccctgaagttcatctgcaccaccggcaagctgcccgtgccctggcccaccctcgtgaccaccctgacctacggcgtgcagtgcttcagccgctaccccgaccacatgaagcagcacgacttcttcaagtccgccatgcccgaaggctacgtccaggagcgcaccatcttcttcaaggacgacggcaactacaagacccgcgccgaggtgaagttcgagggcgacaccctggtgaaccgcatcgagctgaagggcatcgacttcaaggaggacggcaacatcctggggcacaagctggagtacaactacaacagccacaacgtctatatcatggccgacaagcagaagaacggcatcaaggtgaacttcaagatccgccacaacatcgaggacggcagcgtgcagctcgccgaccactaccagcagaacacccccatcggcgacggccccgtgctgctgcccgacaaccactacctgagcacccagtccgccctgagcaaagaccccaacgagaagcgcgatcacatggtcctgctggagttcgtgaccgccgccgggatcactctcggcatggacgagctgtacaaggaattctaactagagctcgctgatcagcctcgactgtgccttctagttgccagccatctgttgtttgcccctcccccgtgccttccttgaccctggaaggtgccactcccactgtcctttcctaataaaatgaggaaattgcatcgcattgtctgagtaggtgtcattctattctggggggtggggtggggcaggacagcaagggggaggattgggaagagaatagcaggcatgctggggacttactgcagtagttttgctgaaatactcgattcacaaaaatatcaacttatggttgttttgtgagatatcaatatatggttgttttgtggttaagttgctgattataaataattattaaatatcactttatggttgcatcaacaggtaccgctggttctttccgcctcagaagaaaaaaagcggccgctgcaacgttatcagctacctactcggcagttcacggccttcagactaaggttgatttgcctgcattgttatcagctacctactcggcagttcacaggaattctagaccctatagtgagtcgtattacggtgtttcgtcctttccacaagatatataaagccaagaaatcgaaatactttcaagttacggtaagcatatgatagtccattttaaaacataattttaaaactgcaaactacccaagaaattattactttctacgtcacgtattttgtactaatatctttgtgtttacagtcaaattaattccaattatctctctaacagccttgtatcgtatatgcaaatatgaaggaatcatgggaaataggccctcgcgtatatctggcccgtacatcgcgaagcagcgcggtaccgagctcgaattcactggccgtcgttttacaacgtcgtgactgggaaaaccctggcgttacccaacttaatcgccttgcagcacatccccctttcgccagctggcgtaatagcgaagaggcccgcaccgatcgcccttcccaacagttgcgcagcctgaatggcgaatggcgcctgatgcggtattttctccttacgcatctgtgcggtatttcacaccgcatatggtgcactctcagtacaatctgctctgatgccgcatagttaagccagccccgacacccgccaacacccgctgacgcgccctgacgggcttgtctgctcccggcatccgcttacagacaagctgtgaccgtctccgggagctgcatgtgtcagaggttttcaccgtcatcaccgaaacgcgcgagacgaaagggcctcgtgatacgcctatttttataggttaatgtcatgataataatggtttcttagacgtcaggtggcacttttcggggaaatgtgcgcggaacccctatttgtttatttttctaaatacattcaaatatgtatccgctcatgagacaataaccctgataaatgcttcaataatattgaaaaaggaagagtatgagtattcaacatttccgtgtcgcccttattcccttttttgcggcattttgccttcctgtttttgctcacccagaaacgctggtgaaagtaaaagatgctgaagatcagttgggtgcacgagtgggttacatcgaactggatctcaacagcggtaagatccttgagagttttcgccccgaagaacgttttccaatgatgagcacttttaaagttctgctatgtggcgcggtattatcccgtattgacgccgggcaagagcaactcggtcgccgcatacactattctcagaatgacttggttgagtactcaccagtcacagaaaagcatcttacggatggcatgacagtaagagaattatgcagtgctgccataaccatgagtgataacactgcggccaacttacttctgacaacgatcggaggaccgaaggagctaaccgcttttttgcacaacatgggggatcatgtaactcgccttgatcgttgggaaccggagctgaatgaagccataccaaacgacgagcgtgacaccacgatgcctgtagcaatggcaacaacgttgcgcaaactattaactggcgaactacttactctagcttcccggcaacaattaatagactggatggaggcggataaagttgcaggaccacttctgcgctcggcccttccggctggctggtttattgctgataaatctggagccggtgagcgtgggtctcgcggtatcattgcagcactggggccagatggtaagccctcccgtatcgtagttatctacacgacggggagtcaggcaactatggatgaacgaaatagacagatcgctgagataggtgcctcactgattaagcattggtaactgtcagaccaagtttactcatatatactttagattgatttaaaacttcatttttaatttaaaggatctaggtgaagatcctttttgataatctcatgaccaaaatcccttaacgtgagttttcgttccactgagcgtcag

SEQ ID NO: 171 - DNA, 3057 bp, Artificial Sequence
  Synthetic
aattcccatgtcagccgttaagtgttcctgtgtcactcaaaattgctttgagaggctctaagggcttctcagtgcgttacatccctggcttgttgtccacaaccgttaaaccttaaaagctttaaaagccttatatattcttttttttcttataaaacttaaaaccttagaggctatttaagttgctgatttatattaattttattgttcaaacatgagagcttagtacgtgaaacatgagagcttagtacgttagccatgagagcttagtacgttagccatgagggtttagttcgttaaacatgagagcttagtacgttaaacatgagagcttagtacgtgaaacatgagagcttagtacgtactatcaacaggttgaactgctgatcttcagatcctctacgccggacgcatcgtggccggatcaattccgttttccgctgcataaccctgcttcggggtcattatagcgattttttcggtatatccatcctttttcgcacgatatacaggattttgccaaagggttcgtgtagactttccttggtgtatccaacggcgtcagccgggcaggataggtgaagtaggcccacccgcgagcgggtgttccttcttcactgtcccttattcgcacctggcggtgctcaacgggaatcctgctctgcgaggctggccggctaccgccggcgtaacagatgagggcaagcggatggctgatgaaaccaagccaaccaggaagggcagcccacctatcacggaattgatccccctcgaattgacgcgtaaccagcaatagacataagcggctatttaacgaccctgccctgaaccgacgaccgggtcgaatttgctttcgaatttctgccattcatccgcttattatcacttattcaggcgtagcaaccaggcgtttaagggcaccaataactgccttaaaaaaattagaaaaactcatcgagcatcaaatgaaactgcaatttattcatatcaggattatcaataccatatttttgaaaaagccgtttctgtaatgaaggagaaaactcaccgaggcagttccataggatggcaagatcctggtatcggtctgcgattccgactcgtccaacatcaatacaacctattaatttcccctcgtcaaaaataaggttatcaagtgagaaatcaccatgagtgacgactgaatccggtgagaatggcaaaagtttatgcatttctttccagacttgttcaacaggccagccattacgctcgtcatcaaaatcactcgcatcaaccaaaccgttattcattcgtgattgcgcctgagcgagacgaaatacgcgatcgctgttaaaaggacaattacaaacaggaatcgaatgcaaccggcgcaggaacactgccagcgcatcaacaatattttcacctgaatcaggatattcttctaatacctggaatgctgtttttccggggatcgcagtggtgagtaaccatgcatcatcaggagtacggataaaatgcttgatggtcggaagaggcataaattccgtcagccagtttagtctgaccatctcatctgtaacatcattggcaacgctacctttgccatgtttcagaaacaactctggcgcatcgggcttcccatacaagcgatagattgtcgcacctgattgcccgacattatcgcgagcccatttatacccatataaatcagcatccatgttggaatttaatcgcggcctcgacgtttcccgttgaatatggctcatactcttcctttttcaatattattgaagcatttatcagggttattgtctcatgagcggatacatatttgaatgtatttagaaaaataaacaaataggggttccgcgcacatttccccgaaaagtgccacctgacgtctaagaaaccattattatcatgacattaacctataaaaataggcgtatcacgaggccctttcgtcacgcgtcctcggtacctaacaccggtcgccaagctttgttgatacaaccataaaatgataattacacccataaattgataattatcacacccagatcggcacgtaagaggttccaactttcaccataatgaaataagatcactaccgggcgtattttttgagttatcgagattttcaggagctaaggaagctaaaatggagaaaaaaatcactggatataccaccgttgatatatcccaatggcatcgtaaagaacattttgaggcatttcagtcagttgctcaatgtacctataaccagaccgttcagctggatattacggcctttttaaagaccgtaaagaaaaataagcacaagttttatccggcctttattcacattcttgcccgcctgatgaatgctcatccggagttccgtatggcaatgaaagacggtgagctggtgatatgggatagtgttcacccttgttacaccgttttccatgagcaaactgaaacgttttcatcgctctggagtgaataccacgacgatttccggcagtttctacacatatattcgcaagatgtggcgtgttacggtgaaaacctggcctatttccctaaagggtttattgagaatatgtttttcgtctcagccaatccctgggtgagtttcaccagttttgatttaaacgtggccaatatggacaacttcttcgcccccgttttcactatgggcaaatattatacgcaaggcgacaaggtgctgatgccgctggcgattcaggttcatcatgccgtctgtgatggcttccatgtcggcagaatgcttaatgaattacaacagtactgcgatgagtggcagggcggggcgtaatttttttaaggcagttattggtgcccttctagagtccttactgcagtagttttgctgaaatactcgattcacaaaaatatcaacttatggttgttttgtgagatatcaatatatggttgttttgtggttaagttgctgattataaataattattaaatatcactttatggttgcatcaacaggtaccttaagccaacctgttaggatccctctagagtagtagtccatgggtatggacagcggtggagggg

SEQ ID NO: 172 - DNA, 6463 bp, Artificial Sequence
  Synthetic
gacggatcgggagatctcccgatcccctatggtcgactctcagtacaatctgctctgatgccgcatagttaagccagtatctgctccctgcttgtgtgttggaggtcgctgagtagtgcgcgagcaaaatttaagctacaacaaggcaaggcttgaccgacaattgcatgaagaatctgcttagggttaggcgttttgcgctgcttcgcgatgtacgggccagatatacgcgttgacattgattattgactagttattaatagtaatcaattacggggtcattagttcatagcccatatatggagttccgcgttacataacttacggtaaatggcccgcctggctgaccgcccaacgacccccgcccattgacgtcaataatgacgtatgttcccatagtaacgccaatagggactttccattgacgtcaatgggtggactatttacggtaaactgcccacttggcagtacatcaagtgtatcatatgccaagtacgccccctattgacgtcaatgacggtaaatggcccgcctggcattatgcccagtacatgaccttatgggactttcctacttggcagtacatctacgtattagtcatcgctattaccatggtgatgcggttttggcagtacatcaatgggcgtggatagcggtttgactcacggggatttccaagtctccaccccattgacgtcaatgggagtttgttttggcaccaaaatcaacgggactttccaaaatgtcgtaacaactccgccccattgacgcaaatgggcggtaggcgtgtacggtgggaggtctatataagcagagctctctggctaactagagaacccactgcttactggcttatcgaaattaatacgactcactatagggagacccaagcttggtaccgagctcggatccgccaccatgggcaaacggacagccgacggaagcgagttcgagtcaccgaaaaagaagcgaaaagttggctccggaatgtccgagacaagagaggcaaggatctctcgcgcaaagagggcctttgtgagcacaccctccgtgcgcaagatcctgtcctatatggatcgctgccgggacctgtccgatctggagtctgagcctacctgtatgatggtgtacggcgcctctggcgtgggcaagaccacagtgatcaagaagtatctgaatcagaataggagggagagcgaggcaggaggcgacatcatccccgtgctgcacatcgagctgcctgacaacgccaagccagtggatgccgccagagagctgctggtggagatgggcgaccctctggccctgtacgagacagatctggccagactgacaaagaggctgaccgagctgatcccagcagtgggagtgaagctgatcatcatcgatgagttccagcacctggtggaggagagaagcaacagggtgctgacacaagtgggcaactggctgaagatgatcctgaataagaccaagtgccctatcgtgatctttggcatgccatatagcaaggtggtgctccaggccaattctcagctgcacggcagattcagcatccaggtggagctgaggccattttcctaccagggaggaaggggcgtgttcaagacctttctggagtatctggacaaggccctgcccttcgagaagcaggcaggactggccaacgagtctctccagaagaagctgtacgccttttcccagggcaacatgcgctctctgcggaatctgatctatcaggcctccatcgaggccatcgacaatcagcacgaaaccatcacagaggaggatttcgtgtttgccagcaagctgacatccggcgacaagccaaacagctggaagaatcccttcgaggagggcgtggaggtgacagaggatatgctgcggccaccccccaaggacatcggctgggaggattacctgagacactccacccccagggtgtctaagcctggcagaaacaagaatttctttgagtaattacattggaagtggataatctagagggccctattctatagtgtcacctaaatgctagagctcgctgatcagcctcgactgtgccttctagttgccagccatctgttgtttgcccctcccccgtgccttccttgaccctggaaggtgccactcccactgtcctttcctaataaaatgaggaaattgcatcgcattgtctgagtaggtgtcattctattctggggggtggggtggggcaggacagcaagggggaggattgggaagacaatagcaggcatgctggggatgcggtgggctctatggcttctgaggcggaaagaaccagctggggctctagggggtatccccacgcgccctgtagcggcgcattaagcgcggcgggtgtggtggttacgcgcagcgtgaccgctacacttgccagcgccctagcgcccgctcctttcgctttcttcccttcctttctcgccacgttcgccggctttccccgtcaagctctaaatcggggcatccctttagggttccgatttagtgctttacggcacctcgaccccaaaaaacttgattagggtgatggttcacgtagtgggccatcgccctgatagacggtttttcgccctttgacgttggagtccacgttctttaatagtggactcttgttccaaactggaacaacactcaaccctatctcggtctattcttttgatttataagggattttggggatttcggcctattggttaaaaaatgagctgatttaacaaaaatttaacgcgaattaattctgtggaatgtgtgtcagttagggtgtggaaagtccccaggctccccaggcaggcagaagtatgcaaagcatgcatctcaattagtcagcaaccaggtgtggaaagtccccaggctccccagcaggcagaagtatgcaaagcatgcatctcaattagtcagcaaccatagtcccgcccctaactccgcccatcccgcccctaactccgcccagttccgcccattctccgccccatggctgactaattttttttatttatgcagaggccgaggccgcctctgcctctgagctattccagaagtagtgaggaggcttttttggaggcctaggcttttgcaaaaagctcccgggagcttgtatatccattttcggatctgatcaagagacaggatgaggatcgtttcgcatgattgaacaagatggattgcacgcaggttctccggccgcttgggtggagaggctattcggctatgactgggcacaacagacaatcggctgctctgatgccgccgtgttccggctgtcagcgcaggggcgcccggttctttttgtcaagaccgacctgtccggtgccctgaatgaactgcaggacgaggcagcgcggctatcgtggctggccacgacgggcgttccttgcgcagctgtgctcgacgttgtcactgaagcgggaagggactggctgctattgggcgaagtgccggggcaggatctcctgtcatctcaccttgctcctgccgagaaagtatccatcatggctgatgcaatgcggcggctgcatacgcttgatccggctacctgcccattcgaccaccaagcgaaacatcgcatcgagcgagcacgtactcggatggaagccggtcttgtcgatcaggatgatctggacgaagagcatcaggggctcgcgccagccgaactgttcgccaggctcaaggcgcgcatgcccgacggcgaggatctcgtcgtgacccatggcgatgcctgcttgccgaatatcatggtggaaaatggccgcttttctggattcatcgactgtggccggctgggtgtggcggaccgctatcaggacatagcgttggctacccgtgatattgctgaagagcttggcggcgaatgggctgaccgcttcctcgtgctttacggtatcgccgctcccgattcgcagcgcatcgccttctatcgccttcttgacgagttcttctgagcgggactctggggttcgaaatgaccgaccaagcgacgcccaacctgccatcacgagatttcgattccaccgccgccttctatgaaaggttgggcttcggaatcgttttccgggacgccggctggatgatcctccagcgcggggatctcatgctggagttcttcgcccaccccaacttgtttattgcagcttataatggttacaaataaagcaatagcatcacaaatttcacaaataaagcatttttttcactgcattctagttgtggtttgtccaaactcatcaatgtatcttatcatgtctgtataccgtcgacctctagctagagcttggcgtaatcatggtcatagctgtttcctgtgtgaaattgttatccgctcacaattccacacaacatacgagccggaagcataaagtgtaaagcctggggtgcctaatgagtgagctaactcacattaattgcgttgcgctcactgcccgctttccagtcgggaaacctgtcgtgccagctgcattaatgaatcggccaacgcgcggggagaggcggtttgcgtattgggcgctcttccgcttcctcgctcactgactcgctgcgctcggtcgttcggctgcggcgagcggtatcagctcactcaaaggcggtaatacggttatccacagaatcaggggataacgcaggaaagaacatgtgagcaaaaggccagcaaaaggccaggaaccgtaaaaaggccgcgttgctggcgtttttccataggctccgcccccctgacgagcatcacaaaaatcgacgctcaagtcagaggtggcgaaacccgacaggactataaagataccaggcgtttccccctggaagctccctcgtgcgctctcctgttccgaccctgccgcttaccggatacctgtccgcctttctcccttcgggaagcgtggcgctttctcaatgctcacgctgtaggtatctcagttcggtgtaggtcgttcgctccaagctgggctgtgtgcacgaaccccccgttcagcccgaccgctgcgccttatccggtaactatcgtcttgagtccaacccggtaagacacgacttatcgccactggcagcagccactggtaacaggattagcagagcgaggtatgtaggcggtgctacagagttcttgaagtggtggcctaactacggctacactagaaggacagtatttggtatctgcgctctgctgaagccagttaccttcggaaaaagagttggtagctcttgatccggcaaacaaaccaccgctggtagcggtggtttttttgtttgcaagcagcagattacgcgcagaaaaaaaggatctcaagaagatcctttgatcttttctacggggtctgacgctcagtggaacgaaaactcacgttaagggattttggtcatgagattatcaaaaaggatcttcacctagatccttttaaattaaaaatgaagttttaaatcaatctaaagtatatatgagtaaacttggtctgacagttaccaatgcttaatcagtgaggcacctatctcagcgatctgtctatttcgttcatccatagttgcctgactccccgtcgtgtagataactacgatacgggagggcttaccatctggccccagtgctgcaatgataccgcgagacccacgctcaccggctccagatttatcagcaataaaccagccagccggaagggccgagcgcagaagtggtcctgcaactttatccgcctccatccagtctattaattgttgccgggaagctagagtaagtagttcgccagttaatagtttgcgcaacgttgttgccattgctacaggcatcgtggtgtcacgctcgtcgtttggtatggcttcattcagctccggttcccaacgatcaaggcgagttacatgatcccccatgttgtgcaaaaaagcggttagctccttcggtcctccgatcgttgtcagaagtaagttggccgcagtgttatcactcatggttatggcagcactgcataattctcttactgtcatgccatccgtaagatgcttttctgtgactggtgagtactcaaccaagtcattctgagaatagtgtatgcggcgaccgagttgctcttgcccggcgtcaatacgggataataccgcgccacatagcagaactttaaaagtgctcatcattggaaaacgttcttcggggcgaaaactctcaaggatcttaccgctgttgagatccagttcgatgtaacccactcgtgcacccaactgatcttcagcatcttttactttcaccagcgtttctgggtgagcaaaaacaggaaggcaaaatgccgcaaaaaagggaataagggcgacacggaaatgttgaatactcatactcttcctttttcattattattgaagcatttatcagggttattgtctcatgagcggatacatatttgaatgtatttagaaaaataaacaaataggggttccgcgcacatttccccgaaaagtgccacctgacgtc

SEQ ID NO: 173 - DNA, 7985 bp, Artificial Sequence
  Synthetic
gacggatcgggagatctcccgatcccctatggtcgactctcagtacaatctgctctgatgccgcatagttaagccagtatctgctccctgcttgtgtgttggaggtcgctgagtagtgcgcgagcaaaatttaagctacaacaaggcaaggcttgaccgacaattgcatgaagaatctgcttagggttaggcgttttgcgctgcttcgcgatgtacgggccagatatacgcgttgacattgattattgactagttattaatagtaatcaattacggggtcattagttcatagcccatatatggagttccgcgttacataacttacggtaaatggcccgcctggctgaccgcccaacgacccccgcccattgacgtcaataatgacgtatgttcccatagtaacgccaatagggactttccattgacgtcaatgggtggactatttacggtaaactgcccacttggcagtacatcaagtgtatcatatgccaagtacgccccctattgacgtcaatgacggtaaatggcccgcctggcattatgcccagtacatgaccttatgggactttcctacttggcagtacatctacgtattagtcatcgctattaccatggtgatgcggttttggcagtacatcaatgggcgtggatagcggtttgactcacggggatttccaagtctccaccccattgacgtcaatgggagtttgttttggcaccaaaatcaacgggactttccaaaatgtcgtaacaactccgccccattgacgcaaatgggcggtaggcgtgtacggtgggaggtctatataagcagagctctctggctaactagagaacccactgcttactggcttatcgaaattaatacgactcactatagggagacccagccaccatggccacatccctgccaaccccctctgccatcaccacaagcgccctggagtacgccttccacacaccagcaaggaacctgaccaagtcccgcggcaagaatatccacagatacgtgagcgtgaagatgagcaagaggatcacagtggagtccaccctggagtgcgacgcctgttaccacttcgattttgagccatctatcgtgcgcttctgtgcccagcccatccggtttctgtactatctgaacggccagagccactcctatgtgcctgacttcctggtgcagtttgataccaacgagttcgtgctgtacgaggtgaaaagcgcctatgccaagaataagccagactttgatgtggagtgggaggccaaggtgaaggcagcaacagagctgggcctggagctggagctggtggaggagtccgacatccgcgataccgtggtgctgaacaatctgaagcgcatgcaccgctacgcctccaaggacgagctgaacaatgtgcacaactctctgctgaagatcatcaagtataatggagcacagtccgccaggtgcctgggagagcagctgggcctgaagggaaggacagtgctgccaatcctgtgcgatctgctgtctaggtgtctgctggacacccgcctggataagcccctgtccctggagtctcggttcgagctggcaagctacggaggcagcggctccggaaaacggacagccgacggaagcgagttcgagtcaccaaagaagaagcggaaagtcggatccggctctggaggcgccaagaagggcttcagctcctttcaccgcaaggccgtgtctagccaggacaccctggagagcatcgagctggtgtcctctgccaactgcctggagagcgtgacataccaggacatctccgccttccctgaaaccatcgccgtggagatcaatttcagactgagcatcctgagatttctggccaggaagtgtgagacaatcgtggccaagtccatcgagcctcaccgggtggagctgcaacagaactatagccggaagatcccaagcgccatcaccatctaccgctggtggctggcctttcggaaaagcgactataatccaatctccctggcccccaacatcaaggatagaggcaatagggagacaaaggtgtccaccgtggtggactctatcatggagcaggcagtggagcgcgtgatcagcggacggaaggtgaacgtgagttccgcctataagagagtgcggagaaaggtgaggcagtacaatctgacccacggcacaaagtacacctatcccaagtacgagtccgtgagaaagagggtgaagaagaaaacccctttcgagctgctggcagcaggcaagggagagagggtggccaagcgggagtttaggcgcatgggcaagaagatcctgacatctagcgtgctggagcgggtggagatcgaccacaccgtggtggatctgttcgccgtgcacgaggagtatagaatccctctgggcaggccctggctgacccagctggtggactgctactctaaggccgtgatcggcttctatctgggctttgagccccctagctacgtgtctgtgagcctggccctgaagaacgccatccagagaaaggacgatctgatctcctcttatgagagcatcgagaacgagtggctgtgctacggcatcccagacctgctggtgacagataatggcaaggagttcctgagcaaggcctttgaccaggcctgtgagtccctgctgatcaacgtgcaccagaataaggtggagacacccgataataagcctcacgtcgagaggaactacggcacaatcaataccagcctgctggacgatctgcccggcaagtccttctctcagtacctccagagggagggatatgactccgtgggagaggccaccctgacactgaacgagatcagagagatctatctgatctggctggtggatatttaccacaagaagcccaatcagcgcggcaccaactgccctaatgtggcctggaagaagggctgtcaggagtgggagcctgaagagtttagcggctccaaggacgagctggatttcaagtttgccatcgtggactacaagcagctgacaaaagtgggcatcaccgtgtacaaggagctgtcttatagcaacgataggctggcagagtacaggggcaagaagggaaaccacaaggtgcagttcaagtataatccagagtgtatggccgtgatctgggtgctggacgaggatatgaacgagtactttacagtgaatgccatcgattacgagtatgcctctcgggtgagcctgtggcagcacaagtacaacatgaagtatcaggccgagctgaatagcgccgagtatgacgaggataaggagatcgacgccgagatcaagatcgaggagatcgccgatagatccatcgtgaaaaccaacaagatcagggcacggagaaggggagcaagacaccaggagaactctgccagggccaagtccatctctaacgccaatcctgcctctatccagaagcacgaggacgagatcgtgagcgccgataacgacgattgggacatcgattacgtgtaactgcagatatccatcacactggcggccgctcgagcatgcatctagagggccctattctatagtgtcacctaaatgctagagctcgctgatcagcctcgactgtgccttctagttgccagccatctgttgtttgcccctcccccgtgccttccttgaccctggaaggtgccactcccactgtcctttcctaataaaatgaggaaattgcatcgcattgtctgagtaggtgtcattctattctggggggtggggtggggcaggacagcaagggggaggattgggaagacaatagcaggcatgctggggatgcggtgggctctatggcttctgaggcggaaagaaccagctggggctctagggggtatccccacgcgccctgtagcggcgcattaagcgcggcgggtgtggtggttacgcgcagcgtgaccgctacacttgccagcgccctagcgcccgctcctttcgctttcttcccttcctttctcgccacgttcgccggctttccccgtcaagctctaaatcggggcatccctttagggttccgatttagtgctttacggcacctcgaccccaaaaaacttgattagggtgatggttcacgtagtgggccatcgccctgatagacggtttttcgccctttgacgttggagtccacgttctttaatagtggactcttgttccaaactggaacaacactcaaccctatctcggtctattcttttgatttataagggattttggggatttcggcctattggttaaaaaatgagctgatttaacaaaaatttaacgcgaattaattctgtggaatgtgtgtcagttagggtgtggaaagtccccaggctccccaggcaggcagaagtatgcaaagcatgcatctcaattagtcagcaaccaggtgtggaaagtccccaggctccccagcaggcagaagtatgcaaagcatgcatctcaattagtcagcaaccatagtcccgcccctaactccgcccatcccgcccctaactccgcccagttccgcccattctccgccccatggctgactaattttttttatttatgcagaggccgaggccgcctctgcctctgagctattccagaagtagtgaggaggcttttttggaggcctaggcttttgcaaaaagctcccgggagcttgtatatccattttcggatctgatcaagagacaggatgaggatcgtttcgcatgattgaacaagatggattgcacgcaggttctccggccgcttgggtggagaggctattcggctatgactgggcacaacagacaatcggctgctctgatgccgccgtgttccggctgtcagcgcaggggcgcccggttctttttgtcaagaccgacctgtccggtgccctgaatgaactgcaggacgaggcagcgcggctatcgtggctggccacgacgggcgttccttgcgcagctgtgctcgacgttgtcactgaagcgggaagggactggctgctattgggcgaagtgccggggcaggatctcctgtcatctcaccttgctcctgccgagaaagtatccatcatggctgatgcaatgcggcggctgcatacgcttgatccggctacctgcccattcgaccaccaagcgaaacatcgcatcgagcgagcacgtactcggatggaagccggtcttgtcgatcaggatgatctggacgaagagcatcaggggctcgcgccagccgaactgttcgccaggctcaaggcgcgcatgcccgacggcgaggatctcgtcgtgacccatggcgatgcctgcttgccgaatatcatggtggaaaatggccgcttttctggattcatcgactgtggccggctgggtgtggcggaccgctatcaggacatagcgttggctacccgtgatattgctgaagagcttggcggcgaatgggctgaccgcttcctcgtgctttacggtatcgccgctcccgattcgcagcgcatcgccttctatcgccttcttgacgagttcttctgagcgggactctggggttcgaaatgaccgaccaagcgacgcccaacctgccatcacgagatttcgattccaccgccgccttctatgaaaggttgggcttcggaatcgttttccgggacgccggctggatgatcctccagcgcggggatctcatgctggagttcttcgcccaccccaacttgtttattgcagcttataatggttacaaataaagcaatagcatcacaaatttcacaaataaagcatttttttcactgcattctagttgtggtttgtccaaactcatcaatgtatcttatcatgtctgtataccgtcgacctctagctagagcttggcgtaatcatggtcatagctgtttcctgtgtgaaattgttatccgctcacaattccacacaacatacgagccggaagcataaagtgtaaagcctggggtgcctaatgagtgagctaactcacattaattgcgttgcgctcactgcccgctttccagtcgggaaacctgtcgtgccagctgcattaatgaatcggccaacgcgcggggagaggcggtttgcgtattgggcgctcttccgcttcctcgctcactgactcgctgcgctcggtcgttcggctgcggcgagcggtatcagctcactcaaaggcggtaatacggttatccacagaatcaggggataacgcaggaaagaacatgtgagcaaaaggccagcaaaaggccaggaaccgtaaaaaggccgcgttgctggcgtttttccataggctccgcccccctgacgagcatcacaaaaatcgacgctcaagtcagaggtggcgaaacccgacaggactataaagataccaggcgtttccccctggaagctccctcgtgcgctctcctgttccgaccctgccgcttaccggatacctgtccgcctttctcccttcgggaagcgtggcgctttctcaatgctcacgctgtaggtatctcagttcggtgtaggtcgttcgctccaagctgggctgtgtgcacgaaccccccgttcagcccgaccgctgcgccttatccggtaactatcgtcttgagtccaacccggtaagacacgacttatcgccactggcagcagccactggtaacaggattagcagagcgaggtatgtaggcggtgctacagagttcttgaagtggtggcctaactacggctacactagaaggacagtatttggtatctgcgctctgctgaagccagttaccttcggaaaaagagttggtagctcttgatccggcaaacaaaccaccgctggtagcggtggtttttttgtttgcaagcagcagattacgcgcagaaaaaaaggatctcaagaagatcctttgatcttttctacggggtctgacgctcagtggaacgaaaactcacgttaagggattttggtcatgagattatcaaaaaggatcttcacctagatccttttaaattaaaaatgaagttttaaatcaatctaaagtatatatgagtaaacttggtctgacagttaccaatgcttaatcagtgaggcacctatctcagcgatctgtctatttcgttcatccatagttgcctgactccccgtcgtgtagataactacgatacgggagggcttaccatctggccccagtgctgcaatgataccgcgagacccacgctcaccggctccagatttatcagcaataaaccagccagccggaagggccgagcgcagaagtggtcctgcaactttatccgcctccatccagtctattaattgttgccgggaagctagagtaagtagttcgccagttaatagtttgcgcaacgttgttgccattgctacaggcatcgtggtgtcacgctcgtcgtttggtatggcttcattcagctccggttcccaacgatcaaggcgagttacatgatcccccatgttgtgcaaaaaagcggttagctccttcggtcctccgatcgttgtcagaagtaagttggccgcagtgttatcactcatggttatggcagcactgcataattctcttactgtcatgccatccgtaagatgcttttctgtgactggtgagtactcaaccaagtcattctgagaatagtgtatgcggcgaccgagttgctcttgcccggcgtcaatacgggataataccgcgccacatagcagaactttaaaagtgctcatcattggaaaacgttcttcggggcgaaaactctcaaggatcttaccgctgttgagatccagttcgatgtaacccactcgtgcacccaactgatcttcagcatcttttactttcaccagcgtttctgggtgagcaaaaacaggaaggcaaaatgccgcaaaaaagggaataagggcgacacggaaatgttgaatactcatactcttcctttttcattattattgaagcatttatcagggttattgtctcatgagcggatacatatttgaatgtatttagaaaaataaacaaataggggttccgcgcacatttccccgaaaagtgccacctgacgtc

SEQ ID NO: 174 - DNA, 6636 bp, Artificial Sequence
  Synthetic
gacggatcgggagatctcccgatcccctatggtgcactctcagtacaatctgctctgatgccgcatagttaagccagtatctgctccctgcttgtgtgttggaggtcgctgagtagtgcgcgagcaaaatttaagctacaacaaggcaaggcttgaccgacaattgcatgaagaatctgcttagggttaggcgttttgcgctgcttcgcgatgtacgggccagatatacgcgttgacattgattattgactagttattaatagtaatcaattacggggtcattagttcatagcccatatatggagttccgcgttacataacttacggtaaatggcccgcctggctgaccgcccaacgacccccgcccattgacgtcaataatgacgtatgttcccatagtaacgccaatagggactttccattgacgtcaatgggtggagtatttacggtaaactgcccacttggcagtacatcaagtgtatcatatgccaagtacgccccctattgacgtcaatgacggtaaatggcccgcctggcattatgcccagtacatgaccttatgggactttcctacttggcagtacatctacgtattagtcatcgctattaccatggtgatgcggttttggcagtacatcaatgggcgtggatagcggtttgactcacggggatttccaagtctccaccccattgacgtcaatgggagtttgttttggcaccaaaatcaacgggactttccaaaatgtcgtaacaactccgccccattgacgcaaatgggcggtaggcgtgtacggtgggaggtctatataagcagagctctctggctaactagagaacccactgcttactggcttatcgaaattaatacgactcactatagggagacccaagctggctagcgtttaaacttaagcttggtaccgagctcggatccgccaccatgggcaaacggacagccgacggaagcgagttcgagtcaccgaaaaagaagcgaaaagttggctccggaatgcactttctggtgcagaccaagctgtaccctgacgaggccctggagagctatctgctgcggctggccagagacaacagctacgatggctattccgagctggccgatatcctgtggcagtggctggtggagcaggaccacgatctggagggcgccctgccactggagctgggcaaggtggacgtgtaccacgccaggcaggccagcagcttcagaatccgggccctgaagctggtggcacagctggccgatgtgaacgcaggaaatatcctggccctggcctggcggcggagcaacttcaagtttggcaatctggtggccgtgagcaggaacgagcagacaatccccctggagctgctgcgcaccgacaatatccccgtgtgcatcgagtgcctgtttgagtctagctacgtgccattccactggcacctgaagccctataagacatgtcacaagcacaagagccagctgaccacacactgtaaggagtgccacaatctgatcgattaccgcgcctccgaggagtttctggagtgctcttgtggctgcaagctgaccaactccgagcagctgaatgacgccgatttcaagatcgcctttgccctggcctcctctaacagccacaagatcgtgggcctgatctcctggttcgccaaggtgaagcagctggacgtgtccgacgccgatttcaatcggacatttgtggattatttctctacctggccagagagcctgaccacagagctggacctgctgacaaacaatgccagactgaagcagctgaacccctttaataagaccaagttcaactccgtgtacggcaatgtgatccgggatggccagatcgccgccacatctaacagaaagaataaggtgctggacgagctgatcaagtattttgtggagctggtggattctaaccccaagaccaagcaccctaatatcgccgacctgctgctgtgcacattcgataccgccgtgctgctgaacaccacaaccgagcaggtgtaccggctgcaccaggagggctttctgaattgcgcctatccccagaagaagcacgagcagctgagggccgactcccacgtgttctatctgcgccaggtcatcgagctgcagcaggcctttgccgccgagacacctcagaccaagaagcagttcatcgccccatggtgagcggccgctcgagtctagagggcccgtttaaacccgctgatcagcctcgactgtgccttctagttgccagccatctgttgtttgcccctcccccgtgccttccttgaccctggaaggtgccactcccactgtcctttcctaataaaatgaggaaattgcatcgcattgtctgagtaggtgtcattctattctggggggtggggtggggcaggacagcaagggggaggattgggaagacaatagcaggcatgctggggatgcggtgggctctatggcttctgaggcggaaagaaccagctggggctctagggggtatccccacgcgccctgtagcggcgcattaagcgcggcgggtgtggtggttacgcgcagcgtgaccgctacacttgccagcgccctagcgcccgctcctttcgctttcttcccttcctttctcgccacgttcgccggctttccccgtcaagctctaaatcgggggctccctttagggttccgatttagtgctttacggcacctcgaccccaaaaaacttgattagggtgatggttcacgtagtgggccatcgccctgatagacggtttttcgccctttgacgttggagtccacgttctttaatagtggactcttgttccaaactggaacaacactcaaccctatctcggtctattcttttgatttataagggattttgccgatttcggcctattggttaaaaaatgagctgatttaacaaaaatttaacgcgaattaattctgtggaatgtgtgtcagttagggtgtggaaagtccccaggctccccagcaggcagaagtatgcaaagcatgcatctcaattagtcagcaaccaggtgtggaaagtccccaggctccccagcaggcagaagtatgcaaagcatgcatctcaattagtcagcaaccatagtcccgcccctaactccgcccatcccgcccctaactccgcccagttccgcccattctccgccccatggctgactaattttttttatttatgcagaggccgaggccgcctctgcctctgagctattccagaagtagtgaggaggcttttttggaggcctaggcttttgcaaaaagctcccgggagcttgtatatccattttcggatctgatcaagagacaggatgaggatcgtttcgcatgattgaacaagatggattgcacgcaggttctccggccgcttgggtggagaggctattcggctatgactgggcacaacagacaatcggctgctctgatgccgccgtgttccggctgtcagcgcaggggcgcccggttctttttgtcaagaccgacctgtccggtgccctgaatgaactgcaggacgaggcagcgcggctatcgtggctggccacgacgggcgttccttgcgcagctgtgctcgacgttgtcactgaagcgggaagggactggctgctattgggcgaagtgccggggcaggatctcctgtcatctcaccttgctcctgccgagaaagtatccatcatggctgatgcaatgcggcggctgcatacgcttgatccggctacctgcccattcgaccaccaagcgaaacatcgcatcgagcgagcacgtactcggatggaagccggtcttgtcgatcaggatgatctggacgaagagcatcaggggctcgcgccagccgaactgttcgccaggctcaaggcgcgcatgcccgacggcgaggatctcgtcgtgacccatggcgatgcctgcttgccgaatatcatggtggaaaatggccgcttttctggattcatcgactgtggccggctgggtgtggcggaccgctatcaggacatagcgttggctacccgtgatattgctgaagagcttggcggcgaatgggctgaccgcttcctcgtgctttacggtatcgccgctcccgattcgcagcgcatcgccttctatcgccttcttgacgagttcttctgagcgggactctggggttcgaaatgaccgaccaagcgacgcccaacctgccatcacgagatttcgattccaccgccgccttctatgaaaggttgggcttcggaatcgttttccgggacgccggctggatgatcctccagcgcggggatctcatgctggagttcttcgcccaccccaacttgtttattgcagcttataatggttacaaataaagcaatagcatcacaaatttcacaaataaagcatttttttcactgcattctagttgtggtttgtccaaactcatcaatgtatcttatcatgtctgtataccgtcgacctctagctagagcttggcgtaatcatggtcatagctgtttcctgtgtgaaattgttatccgctcacaattccacacaacatacgagccggaagcataaagtgtaaagcctggggtgcctaatgagtgagctaactcacattaattgcgttgcgctcactgcccgctttccagtcgggaaacctgtcgtgccagctgcattaatgaatcggccaacgcgcggggagaggcggtttgcgtattgggcgctcttccgcttcctcgctcactgactcgctgcgctcggtcgttcggctgcggcgagcggtatcagctcactcaaaggcggtaatacggttatccacagaatcaggggataacgcaggaaagaacatgtgagcaaaaggccagcaaaaggccaggaaccgtaaaaaggccgcgttgctggcgtttttccataggctccgcccccctgacgagcatcacaaaaatcgacgctcaagtcagaggtggcgaaacccgacaggactataaagataccaggcgtttccccctggaagctccctcgtgcgctctcctgttccgaccctgccgcttaccggatacctgtccgcctttctcccttcgggaagcgtggcgctttctcatagctcacgctgtaggtatctcagttcggtgtaggtcgttcgctccaagctgggctgtgtgcacgaaccccccgttcagcccgaccgctgcgccttatccggtaactatcgtcttgagtccaacccggtaagacacgacttatcgccactggcagcagccactggtaacaggattagcagagcgaggtatgtaggcggtgctacagagttcttgaagtggtggcctaactacggctacactagaagaacagtatttggtatctgcgctctgctgaagccagttaccttcggaaaaagagttggtagctcttgatccggcaaacaaaccaccgctggtagcggtttttttgtttgcaagcagcagattacgcgcagaaaaaaaggatctcaagaagatcctttgatcttttctacggggtctgacgctcagtggaacgaaaactcacgttaagggattttggtcatgagattatcaaaaaggatcttcacctagatccttttaaattaaaaatgaagttttaaatcaatctaaagtatatatgagtaaacttggtctgacagttaccaatgcttaatcagtgaggcacctatctcagcgatctgtctatttcgttcatccatagttgcctgactccccgtcgtgtagataactacgatacgggagggcttaccatctggccccagtgctgcaatgataccgcgagacccacgctcaccggctccagatttatcagcaataaaccagccagccggaagggccgagcgcagaagtggtcctgcaactttatccgcctccatccagtctattaattgttgccgggaagctagagtaagtagttcgccagttaatagtttgcgcaacgttgttgccattgctacaggcatcgtggtgtcacgctcgtcgtttggtatggcttcattcagctccggttcccaacgatcaaggcgagttacatgatcccccatgttgtgcaaaaaagcggttagctccttcggtcctccgatcgttgtcagaagtaagttggccgcagtgttatcactcatggttatggcagcactgcataattctcttactgtcatgccatccgtaagatgcttttctgtgactggtgagtactcaaccaagtcattctgagaatagtgtatgcggcgaccgagttgctcttgcccggcgtcaatacgggataataccgcgccacatagcagaactttaaaagtgctcatcattggaaaacgttcttcggggcgaaaactctcaaggatcttaccgctgttgagatccagttcgatgtaacccactcgtgcacccaactgatcttcagcatcttttactttcaccagcgtttctgggtgagcaaaaacaggaaggcaaaatgccgcaaaaaagggaataagggcgacacggaaatgttgaatactcatactcttcctttttcaatattattgaagcatttatcagggttattgtctcatgagcggatacatatttgaatgtatttagaaaaataaacaaataggggttccgcgcacatttccccgaaaagtgccacctgacgtc

SEQ ID NO: 175 - DNA, 7512 bp, Artificial Sequence
  Synthetic
gacggatcgggagatctcccgatcccctatggtgcactctcagtacaatctgctctgatgccgcatagttaagccagtatctgctccctgcttgtgtgttggaggtcgctgagtagtgcgcgagcaaaatttaagctacaacaaggcaaggcttgaccgacaattgcatgaagaatctgcttagggttaggcgttttgcgctgcttcgcgatgtacgggccagatatacgcgttgacattgattattgactagttattaatagtaatcaattacggggtcattagttcatagcccatatatggagttccgcgttacataacttacggtaaatggcccgcctggctgaccgcccaacgacccccgcccattgacgtcaataatgacgtatgttcccatagtaacgccaatagggactttccattgacgtcaatgggtggagtatttacggtaaactgcccacttggcagtacatcaagtgtatcatatgccaagtacgccccctattgacgtcaatgacggtaaatggcccgcctggcattatgcccagtacatgaccttatgggactttcctacttggcagtacatctacgtattagtcatcgctattaccatggtgatgcggttttggcagtacatcaatgggcgtggatagcggtttgactcacggggatttccaagtctccaccccattgacgtcaatgggagtttgttttggcaccaaaatcaacgggactttccaaaatgtcgtaacaactccgccccattgacgcaaatgggcggtaggcgtgtacggtgggaggtctatataagcagagctctctggctaactagagaacccactgcttactggcttatcgaaattaatacgactcactatagggagacccaagctggctagcgtttaaacttaagcttggtaccgagctcggatccgccaccatgggcaaacggacagccgacggaagcgagttcgagtcaccgaaaaagaagcgaaaagttggctccggaatgaacctgcaggacgccttcgccatcgagagcctgaaggagaagaccacagccctgagaaagctgttcacaccctacatgtcccacgtggccgtggatggctttgaggagcaggccctgaccgtgctgatcaatctggtgtataagaggtccgagatcgacgatctgacctctacacgcaccgcaaagagcgtgctgcgggacgaggtgctgctgtctaagtgcatcaatgaggtgaagtggttccacacacacaacctgaagtacccagacatccgcgtgtcccaccagcggctgatcagcaaggtggtgtccgaggatatcgcaggaatctgcagccggagcctgcccctgtcttttggctggagccacaattccgccgagatcaaccacgccaagctgttcctgaccagcttcacctggcagggcgaggtgacctgtctggccaatctgctgatcaacgaggagcccgtgtggatcaacctgatcaggacatacggcttcaccaagaaggccgtgctgggcatcgccggcaagatcaagcagctgctgcctgtggccgagctgccactggaggtgagctccttcagcccccagctgcagatgccttttcagcagtcctatctggccgtgacaccagtggtgtctcacgccatgctggccaagatccagcagctgaccacagacagaaagctgaatttcggactggtggagcactccaggccagcaaacgtgggcgatctggcctctagcgtgggaggcaatatccgggtgctgagatactttcctaagacatattccaaggccgtgaactgctctgaggtgttcaacaatgattctgagaaggcctttaagatccgcgccctgctgaacagccagttccagcaggccctgctggtgctggtgggcatcaagcagtttaataccctgaggcagaagcgcctggcccgggtggcagcaatcagacaggtgagggtgagcctgcagctgtggctggacaatatcctggaggccaagaacaatgcacagggacaggcctaccccgagtgggcaaagcactatctggatcagtccatcaccaactgtatctctcagttcagcaatgtgctgaacgagtccctgggcaatctgtctaagctgaagcggtttgcctaccacccaaatctgatgggcgtgttcaagacacagctgaactacgtgttcacccactgcatccccgacgaggagacactgaacgatgagcagatcgtgtacgtgcactgtcaggacatgcgcgtgttcgatgccgaggccatggccaatccatatatccagggcatgcccagcctgaccgccctgaatggcctggcccacaacttcgagcggaagctgaagaactttatcgaccctagcatcaagtgcatcggctccgccatcaatatcgagtcttaccagctgcacacaggcaagccactgcccgagcctagcaagctgaagcaggtggccggcagaagccacgtgatcaggtccggcatcatcgacaagcccaagtgtgacatcaccctggatctggtgttcagactgtttgtgcctaatatcaagctgctggataagctgaacagccagctggtgaagccagccctgccatccatgtttgcaggaggcacaatgcacccaccttccctgtaccagaacatcgattggtgtcacctgcacaccaagccttctgagctgttcaagaatatcaaggccaagtctctgaacggcagctggctgtatccaagcaagaaggtggtgaagtcctttgagcagctgatcgacgccctgaacggcaatttcaacctgcgccctgcagcaatcggatttgccgccctggaggagccaatcaagcgggatgtggccctgcacgagtaccactgctatgcagagcccgtgatcggactgctggagtgcgtgagcaacacctctgtgaagtacgccggcgccaagcagttctttcacgacgccttctgggtcatggatgtgcagaaggagtctatgctgatgaagaagagcaagtttgagtatgagtgagcggccgctcgagtctagagggcccgtttaaacccgctgatcagcctcgactgtgccttctagttgccagccatctgttgtttgcccctcccccgtgccttccttgaccctggaaggtgccactcccactgtcctttcctaataaaatgaggaaattgcatcgcattgtctgagtaggtgtcattctattctggggggtggggtggggcaggacagcaagggggaggattgggaagacaatagcaggcatgctggggatgcggtgggctctatggcttctgaggcggaaagaaccagctggggctctagggggtatccccacgcgccctgtagcggcgcattaagcgcggcgggtgtggtggttacgcgcagcgtgaccgctacacttgccagcgccctagcgcccgctcctttcgctttcttcccttcctttctcgccacgttcgccggctttccccgtcaagctctaaatcgggggctccctttagggttccgatttagtgctttacggcacctcgaccccaaaaaacttgattagggtgatggttcacgtagtgggccatcgccctgatagacggtttttcgccctttgacgttggagtccacgttctttaatagtggactcttgttccaaactggaacaacactcaaccctatctcggtctattcttttgatttataagggattttgccgatttcggcctattggttaaaaaatgagctgatttaacaaaaatttaacgcgaattaattctgtggaatgtgtgtcagttagggtgtggaaagtccccaggctccccagcaggcagaagtatgcaaagcatgcatctcaattagtcagcaaccaggtgtggaaagtccccaggctccccagcaggcagaagtatgcaaagcatgcatctcaattagtcagcaaccatagtcccgcccctaactccgcccatcccgcccctaactccgcccagttccgcccattctccgccccatggctgactaattttttttatttatgcagaggccgaggccgcctctgcctctgagctattccagaagtagtgaggaggcttttttggaggcctaggcttttgcaaaaagctcccgggagcttgtatatccattttcggatctgatcaagagacaggatgaggatcgtttcgcatgattgaacaagatggattgcacgcaggttctccggccgcttgggtggagaggctattcggctatgactgggcacaacagacaatcggctgctctgatgccgccgtgttccggctgtcagcgcaggggcgcccggttctttttgtcaagaccgacctgtccggtgccctgaatgaactgcaggacgaggcagcgcggctatcgtggctggccacgacgggcgttccttgcgcagctgtgctcgacgttgtcactgaagcgggaagggactggctgctattgggcgaagtgccggggcaggatctcctgtcatctcaccttgctcctgccgagaaagtatccatcatggctgatgcaatgcggcggctgcatacgcttgatccggctacctgcccattcgaccaccaagcgaaacatcgcatcgagcgagcacgtactcggatggaagccggtcttgtcgatcaggatgatctggacgaagagcatcaggggctcgcgccagccgaactgttcgccaggctcaaggcgcgcatgcccgacggcgaggatctcgtcgtgacccatggcgatgcctgcttgccgaatatcatggtggaaaatggccgcttttctggattcatcgactgtggccggctgggtgtggcggaccgctatcaggacatagcgttggctacccgtgatattgctgaagagcttggcggcgaatgggctgaccgcttcctcgtgctttacggtatcgccgctcccgattcgcagcgcatcgccttctatcgccttcttgacgagttcttctgagcgggactctggggttcgaaatgaccgaccaagcgacgcccaacctgccatcacgagatttcgattccaccgccgccttctatgaaaggttgggcttcggaatcgttttccgggacgccggctggatgatcctccagcgcggggatctcatgctggagttcttcgcccaccccaacttgtttattgcagcttataatggttacaaataaagcaatagcatcacaaatttcacaaataaagcatttttttcactgcattctagttgtggtttgtccaaactcatcaatgtatcttatcatgtctgtataccgtcgacctctagctagagcttggcgtaatcatggtcatagctgtttcctgtgtgaaattgttatccgctcacaattccacacaacatacgagccggaagcataaagtgtaaagcctggggtgcctaatgagtgagctaactcacattaattgcgttgcgctcactgcccgctttccagtcgggaaacctgtcgtgccagctgcattaatgaatcggccaacgcgcggggagaggcggtttgcgtattgggcgctcttccgcttcctcgctcactgactcgctgcgctcggtcgttcggctgcggcgagcggtatcagctcactcaaaggcggtaatacggttatccacagaatcaggggataacgcaggaaagaacatgtgagcaaaaggccagcaaaaggccaggaaccgtaaaaaggccgcgttgctggcgtttttccataggctccgcccccctgacgagcatcacaaaaatcgacgctcaagtcagaggtggcgaaacccgacaggactataaagataccaggcgtttccccctggaagctccctcgtgcgctctcctgttccgaccctgccgcttaccggatacctgtccgcctttctcccttcgggaagcgtggcgctttctcatagctcacgctgtaggtatctcagttcggtgtaggtcgttcgctccaagctgggctgtgtgcacgaaccccccgttcagcccgaccgctgcgccttatccggtaactatcgtcttgagtccaacccggtaagacacgacttatcgccactggcagcagccactggtaacaggattagcagagcgaggtatgtaggcggtgctacagagttcttgaagtggtggcctaactacggctacactagaagaacagtatttggtatctgcgctctgctgaagccagttaccttcggaaaaagagttggtagctcttgatccggcaaacaaaccaccgctggtagcggtttttttgtttgcaagcagcagattacgcgcagaaaaaaaggatctcaagaagatcctttgatcttttctacggggtctgacgctcagtggaacgaaaactcacgttaagggattttggtcatgagattatcaaaaaggatcttcacctagatccttttaaattaaaaatgaagttttaaatcaatctaaagtatatatgagtaaacttggtctgacagttaccaatgcttaatcagtgaggcacctatctcagcgatctgtctatttcgttcatccatagttgcctgactccccgtcgtgtagataactacgatacgggagggcttaccatctggccccagtgctgcaatgataccgcgagacccacgctcaccggctccagatttatcagcaataaaccagccagccggaagggccgagcgcagaagtggtcctgcaactttatccgcctccatccagtctattaattgttgccgggaagctagagtaagtagttcgccagttaatagtttgcgcaacgttgttgccattgctacaggcatcgtggtgtcacgctcgtcgtttggtatggcttcattcagctccggttcccaacgatcaaggcgagttacatgatcccccatgttgtgcaaaaaagcggttagctccttcggtcctccgatcgttgtcagaagtaagttggccgcagtgttatcactcatggttatggcagcactgcataattctcttactgtcatgccatccgtaagatgcttttctgtgactggtgagtactcaaccaagtcattctgagaatagtgtatgcggcgaccgagttgctcttgcccggcgtcaatacgggataataccgcgccacatagcagaactttaaaagtgctcatcattggaaaacgttcttcggggcgaaaactctcaaggatcttaccgctgttgagatccagttcgatgtaacccactcgtgcacccaactgatcttcagcatcttttactttcaccagcgtttctgggtgagcaaaaacaggaaggcaaaatgccgcaaaaaagggaataagggcgacacggaaatgttgaatactcatactcttcctttttcaatattattgaagcatttatcagggttattgtctcatgagcggatacatatttgaatgtatttagaaaaataaacaaataggggttccgcgcacatttccccgaaaagtgccacctgacgtc

SEQ ID NO: 176 - DNA, 6489 bp, Artificial Sequence
  Synthetic
gacggatcgggagatctcccgatcccctatggtgcactctcagtacaatctgctctgatgccgcatagttaagccagtatctgctccctgcttgtgtgttggaggtcgctgagtagtgcgcgagcaaaatttaagctacaacaaggcaaggcttgaccgacaattgcatgaagaatctgcttagggttaggcgttttgcgctgcttcgcgatgtacgggccagatatacgcgttgacattgattattgactagttattaatagtaatcaattacggggtcattagttcatagcccatatatggagttccgcgttacataacttacggtaaatggcccgcctggctgaccgcccaacgacccccgcccattgacgtcaataatgacgtatgttcccatagtaacgccaatagggactttccattgacgtcaatgggtggagtatttacggtaaactgcccacttggcagtacatcaagtgtatcatatgccaagtacgccccctattgacgtcaatgacggtaaatggcccgcctggcattatgcccagtacatgaccttatgggactttcctacttggcagtacatctacgtattagtcatcgctattaccatggtgatgcggttttggcagtacatcaatgggcgtggatagcggtttgactcacggggatttccaagtctccaccccattgacgtcaatgggagtttgttttggcaccaaaatcaacgggactttccaaaatgtcgtaacaactccgccccattgacgcaaatgggcggtaggcgtgtacggtgggaggtctatataagcagagctctctggctaactagagaacccactgcttactggcttatcgaaattaatacgactcactatagggagacccaagctggctagcgtttaaacttaagcttggtaccgagctcggatccgccaccatgggcaaacggacagccgacggaagcgagttcgagtcaccgaaaaagaagcgaaaagttggctccggaatgcagctgccaaggcacctgtcctacacccggagcctgagcccttccaaggccgtgttcttttataagacatctgagagcgacttcgagccactgcagatcgagcagaacaagctggtgggccagaagtctggctttggcgatgcctaccagaagcagaacgtggccaagaatctggcacctcaggacctggccttcggcaacccacagaccatcgacgtgtgctatgtgccccctgccgtgaatgagctgttctgtaggtttagcctgcgcgtggaggccaactccaatgagccacacgtgtgcgacgatcccaaagtgatctactggctgaagcggttctttgagacctataagaagcacaacggcctgaatgaggtggccacaagatacgccaagaacatcctgatgggcaattggctgtggcggaacagacagtcccctaatgtggacatcgagatcctgacagagcacgcagcaccaatcatcgtggagggagcccagaagctgaagtggcagggcaattggcagaacaatcagaccgccctgatcacactgtctgaggccatccaggagggcctgagcaacccccagaattactgttatctggatatcaccgccaagatcaagaacgccttctcccaggaggtgcacccttctcagaagtttgtggacaatgtggagcagggcatgagctccaagcagctggcctatacacaagtgggcgataagaaggccgccagcctgaactcccagaaagtgggcgccgccatccagaccatcgacgattggtacgagggcggctataagcctctgaggacacacgagtacggcgccgacaagcagatcctggtggcccacaggaccccaaagtcccactctgacttctactccctgctgccccgcatcgccctgcacatcaagcacatggagaagcacggcctggagcagtctgaggagagcaatgccgtgcacttcatcgccgccgtgctgatcaagggcggcctgtttcagcggagcaaggcctgagcggccgctcgagtctagagggcccgtttaaacccgctgatcagcctcgactgtgccttctagttgccagccatctgttgtttgcccctcccccgtgccttccttgaccctggaaggtgccactcccactgtcctttcctaataaaatgaggaaattgcatcgcattgtctgagtaggtgtcattctattctggggggtggggtggggcaggacagcaagggggaggattgggaagacaatagcaggcatgctggggatgcggtgggctctatggcttctgaggcggaaagaaccagctggggctctagggggtatccccacgcgccctgtagcggcgcattaagcgcggcgggtgtggtggttacgcgcagcgtgaccgctacacttgccagcgccctagcgcccgctcctttcgctttcttcccttcctttctcgccacgttcgccggctttccccgtcaagctctaaatcgggggctccctttagggttccgatttagtgctttacggcacctcgaccccaaaaaacttgattagggtgatggttcacgtagtgggccatcgccctgatagacggtttttcgccctttgacgttggagtccacgttctttaatagtggactcttgttccaaactggaacaacactcaaccctatctcggtctattcttttgatttataagggattttgccgatttcggcctattggttaaaaaatgagctgatttaacaaaaatttaacgcgaattaattctgtggaatgtgtgtcagttagggtgtggaaagtccccaggctccccagcaggcagaagtatgcaaagcatgcatctcaattagtcagcaaccaggtgtggaaagtccccaggctccccagcaggcagaagtatgcaaagcatgcatctcaattagtcagcaaccatagtcccgcccctaactccgcccatcccgcccctaactccgcccagttccgcccattctccgccccatggctgactaattttttttatttatgcagaggccgaggccgcctctgcctctgagctattccagaagtagtgaggaggcttttttggaggcctaggcttttgcaaaaagctcccgggagcttgtatatccattttcggatctgatcaagagacaggatgaggatcgtttcgcatgattgaacaagatggattgcacgcaggttctccggccgcttgggtggagaggctattcggctatgactgggcacaacagacaatcggctgctctgatgccgccgtgttccggctgtcagcgcaggggcgcccggttctttttgtcaagaccgacctgtccggtgccctgaatgaactgcaggacgaggcagcgcggctatcgtggctggccacgacgggcgttccttgcgcagctgtgctcgacgttgtcactgaagcgggaagggactggctgctattgggcgaagtgccggggcaggatctcctgtcatctcaccttgctcctgccgagaaagtatccatcatggctgatgcaatgcggcggctgcatacgcttgatccggctacctgcccattcgaccaccaagcgaaacatcgcatcgagcgagcacgtactcggatggaagccggtcttgtcgatcaggatgatctggacgaagagcatcaggggctcgcgccagccgaactgttcgccaggctcaaggcgcgcatgcccgacggcgaggatctcgtcgtgacccatggcgatgcctgcttgccgaatatcatggtggaaaatggccgcttttctggattcatcgactgtggccggctgggtgtggcggaccgctatcaggacatagcgttggctacccgtgatattgctgaagagcttggcggcgaatgggctgaccgcttcctcgtgctttacggtatcgccgctcccgattcgcagcgcatcgccttctatcgccttcttgacgagttcttctgagcgggactctggggttcgaaatgaccgaccaagcgacgcccaacctgccatcacgagatttcgattccaccgccgccttctatgaaaggttgggcttcggaatcgttttccgggacgccggctggatgatcctccagcgcggggatctcatgctggagttcttcgcccaccccaacttgtttattgcagcttataatggttacaaataaagcaatagcatcacaaatttcacaaataaagcatttttttcactgcattctagttgtggtttgtccaaactcatcaatgtatcttatcatgtctgtataccgtcgacctctagctagagcttggcgtaatcatggtcatagctgtttcctgtgtgaaattgttatccgctcacaattccacacaacatacgagccggaagcataaagtgtaaagcctggggtgcctaatgagtgagctaactcacattaattgcgttgcgctcactgcccgctttccagtcgggaaacctgtcgtgccagctgcattaatgaatcggccaacgcgcggggagaggcggtttgcgtattgggcgctcttccgcttcctcgctcactgactcgctgcgctcggtcgttcggctgcggcgagcggtatcagctcactcaaaggcggtaatacggttatccacagaatcaggggataacgcaggaaagaacatgtgagcaaaaggccagcaaaaggccaggaaccgtaaaaaggccgcgttgctggcgtttttccataggctccgcccccctgacgagcatcacaaaaatcgacgctcaagtcagaggtggcgaaacccgacaggactataaagataccaggcgtttccccctggaagctccctcgtgcgctctcctgttccgaccctgccgcttaccggatacctgtccgcctttctcccttcgggaagcgtggcgctttctcatagctcacgctgtaggtatctcagttcggtgtaggtcgttcgctccaagctgggctgtgtgcacgaaccccccgttcagcccgaccgctgcgccttatccggtaactatcgtcttgagtccaacccggtaagacacgacttatcgccactggcagcagccactggtaacaggattagcagagcgaggtatgtaggcggtgctacagagttcttgaagtggtggcctaactacggctacactagaagaacagtatttggtatctgcgctctgctgaagccagttaccttcggaaaaagagttggtagctcttgatccggcaaacaaaccaccgctggtagcggtttttttgtttgcaagcagcagattacgcgcagaaaaaaaggatctcaagaagatcctttgatcttttctacggggtctgacgctcagtggaacgaaaactcacgttaagggattttggtcatgagattatcaaaaaggatcttcacctagatccttttaaattaaaaatgaagttttaaatcaatctaaagtatatatgagtaaacttggtctgacagttaccaatgcttaatcagtgaggcacctatctcagcgatctgtctatttcgttcatccatagttgcctgactccccgtcgtgtagataactacgatacgggagggcttaccatctggccccagtgctgcaatgataccgcgagacccacgctcaccggctccagatttatcagcaataaaccagccagccggaagggccgagcgcagaagtggtcctgcaactttatccgcctccatccagtctattaattgttgccgggaagctagagtaagtagttcgccagttaatagtttgcgcaacgttgttgccattgctacaggcatcgtggtgtcacgctcgtcgtttggtatggcttcattcagctccggttcccaacgatcaaggcgagttacatgatcccccatgttgtgcaaaaaagcggttagctccttcggtcctccgatcgttgtcagaagtaagttggccgcagtgttatcactcatggttatggcagcactgcataattctcttactgtcatgccatccgtaagatgcttttctgtgactggtgagtactcaaccaagtcattctgagaatagtgtatgcggcgaccgagttgctcttgcccggcgtcaatacgggataataccgcgccacatagcagaactttaaaagtgctcatcattggaaaacgttcttcggggcgaaaactctcaaggatcttaccgctgttgagatccagttcgatgtaacccactcgtgcacccaactgatcttcagcatcttttactttcaccagcgtttctgggtgagcaaaaacaggaaggcaaaatgccgcaaaaaagggaataagggcgacacggaaatgttgaatactcatactcttcctttttcaatattattgaagcatttatcagggttattgtctcatgagcggatacatatttgaatgtatttagaaaaataaacaaataggggttccgcgcacatttccccgaaaagtgccacctgacgtc

SEQ ID NO: 177 - DNA, 6063 bp, Artificial Sequence
  Synthetic
gacggatcgggagatctcccgatcccctatggtgcactctcagtacaatctgctctgatgccgcatagttaagccagtatctgctccctgcttgtgtgttggaggtcgctgagtagtgcgcgagcaaaatttaagctacaacaaggcaaggcttgaccgacaattgcatgaagaatctgcttagggttaggcgttttgcgctgcttcgcgatgtacgggccagatatacgcgttgacattgattattgactagttattaatagtaatcaattacggggtcattagttcatagcccatatatggagttccgcgttacataacttacggtaaatggcccgcctggctgaccgcccaacgacccccgcccattgacgtcaataatgacgtatgttcccatagtaacgccaatagggactttccattgacgtcaatgggtggagtatttacggtaaactgcccacttggcagtacatcaagtgtatcatatgccaagtacgccccctattgacgtcaatgacggtaaatggcccgcctggcattatgcccagtacatgaccttatgggactttcctacttggcagtacatctacgtattagtcatcgctattaccatggtgatgcggttttggcagtacatcaatgggcgtggatagcggtttgactcacggggatttccaagtctccaccccattgacgtcaatgggagtttgttttggcaccaaaatcaacgggactttccaaaatgtcgtaacaactccgccccattgacgcaaatgggcggtaggcgtgtacggtgggaggtctatataagcagagctctctggctaactagagaacccactgcttactggcttatcgaaattaatacgactcactatagggagacccaagctggctagcgtttaaacttaagcttggtaccgagctcggatccgccaccatgggcaaacggacagccgacggaagcgagttcgagtcaccgaaaaagaagcgaaaagttggctccggaatgctgaagagatactacttcaccatcacctacctgcctaagaattgcgacgtgtctctcctggctggcagatgtatcggcatcctgcacggctttatgagcagcagagaaatcagcaacatcggagtgtgcttccccaagtggaacgagcaggagattggaaatgaactggccttcgtttccaccgacaagaaacagctgaccaacctgtctcagcagagctactttgagatgatggcccaggacaagctgttcggcctgagcaagatcctggaagtgcctaccaaccagaacgaagtgatgttcatccggaaccagagcgtggccaaggctttcgtgggcgagaagcagcgcagactgaagcgggccaagaaaagagccgaggctagaggcgaagtctacaaccccgagtaccagttcgaggccaaagacatcggccacttccacagcatccctgtgtccagcaaggccaacggccagtcttatgtgctgcacatccagaagatcgagaacacaaacgccacagagaatcaatttaacaactacggcttcgccaccaatcaaacattccagggcacagtgccaagcctgaacacccagtgagcggccgctcgagtctagagggcccgtttaaacccgctgatcagcctcgactgtgccttctagttgccagccatctgttgtttgcccctcccccgtgccttccttgaccctggaaggtgccactcccactgtcctttcctaataaaatgaggaaattgcatcgcattgtctgagtaggtgtcattctattctggggggtggggtggggcaggacagcaagggggaggattgggaagacaatagcaggcatgctggggatgcggtgggctctatggcttctgaggcggaaagaaccagctggggctctagggggtatccccacgcgccctgtagcggcgcattaagcgcggcgggtgtggtggttacgcgcagcgtgaccgctacacttgccagcgccctagcgcccgctcctttcgctttcttcccttcctttctcgccacgttcgccggctttccccgtcaagctctaaatcgggggctccctttagggttccgatttagtgctttacggcacctcgaccccaaaaaacttgattagggtgatggttcacgtagtgggccatcgccctgatagacggtttttcgccctttgacgttggagtccacgttctttaatagtggactcttgttccaaactggaacaacactcaaccctatctcggtctattcttttgatttataagggattttgccgatttcggcctattggttaaaaaatgagctgatttaacaaaaatttaacgcgaattaattctgtggaatgtgtgtcagttagggtgtggaaagtccccaggctccccagcaggcagaagtatgcaaagcatgcatctcaattagtcagcaaccaggtgtggaaagtccccaggctccccagcaggcagaagtatgcaaagcatgcatctcaattagtcagcaaccatagtcccgcccctaactccgcccatcccgcccctaactccgcccagttccgcccattctccgccccatggctgactaattttttttatttatgcagaggccgaggccgcctctgcctctgagctattccagaagtagtgaggaggcttttttggaggcctaggcttttgcaaaaagctcccgggagcttgtatatccattttcggatctgatcaagagacaggatgaggatcgtttcgcatgattgaacaagatggattgcacgcaggttctccggccgcttgggtggagaggctattcggctatgactgggcacaacagacaatcggctgctctgatgccgccgtgttccggctgtcagcgcaggggcgcccggttctttttgtcaagaccgacctgtccggtgccctgaatgaactgcaggacgaggcagcgcggctatcgtggctggccacgacgggcgttccttgcgcagctgtgctcgacgttgtcactgaagcgggaagggactggctgctattgggcgaagtgccggggcaggatctcctgtcatctcaccttgctcctgccgagaaagtatccatcatggctgatgcaatgcggcggctgcatacgcttgatccggctacctgcccattcgaccaccaagcgaaacatcgcatcgagcgagcacgtactcggatggaagccggtcttgtcgatcaggatgatctggacgaagagcatcaggggctcgcgccagccgaactgttcgccaggctcaaggcgcgcatgcccgacggcgaggatctcgtcgtgacccatggcgatgcctgcttgccgaatatcatggtggaaaatggccgcttttctggattcatcgactgtggccggctgggtgtggcggaccgctatcaggacatagcgttggctacccgtgatattgctgaagagcttggcggcgaatgggctgaccgcttcctcgtgctttacggtatcgccgctcccgattcgcagcgcatcgccttctatcgccttcttgacgagttcttctgagcgggactctggggttcgaaatgaccgaccaagcgacgcccaacctgccatcacgagatttcgattccaccgccgccttctatgaaaggttgggcttcggaatcgttttccgggacgccggctggatgatcctccagcgcggggatctcatgctggagttcttcgcccaccccaacttgtttattgcagcttataatggttacaaataaagcaatagcatcacaaatttcacaaataaagcatttttttcactgcattctagttgtggtttgtccaaactcatcaatgtatcttatcatgtctgtataccgtcgacctctagctagagcttggcgtaatcatggtcatagctgtttcctgtgtgaaattgttatccgctcacaattccacacaacatacgagccggaagcataaagtgtaaagcctggggtgcctaatgagtgagctaactcacattaattgcgttgcgctcactgcccgctttccagtcgggaaacctgtcgtgccagctgcattaatgaatcggccaacgcgcggggagaggcggtttgcgtattgggcgctcttccgcttcctcgctcactgactcgctgcgctcggtcgttcggctgcggcgagcggtatcagctcactcaaaggcggtaatacggttatccacagaatcaggggataacgcaggaaagaacatgtgagcaaaaggccagcaaaaggccaggaaccgtaaaaaggccgcgttgctggcgtttttccataggctccgcccccctgacgagcatcacaaaaatcgacgctcaagtcagaggtggcgaaacccgacaggactataaagataccaggcgtttccccctggaagctccctcgtgcgctctcctgttccgaccctgccgcttaccggatacctgtccgcctttctcccttcgggaagcgtggcgctttctcatagctcacgctgtaggtatctcagttcggtgtaggtcgttcgctccaagctgggctgtgtgcacgaaccccccgttcagcccgaccgctgcgccttatccggtaactatcgtcttgagtccaacccggtaagacacgacttatcgccactggcagcagccactggtaacaggattagcagagcgaggtatgtaggcggtgctacagagttcttgaagtggtggcctaactacggctacactagaagaacagtatttggtatctgcgctctgctgaagccagttaccttcggaaaaagagttggtagctcttgatccggcaaacaaaccaccgctggtagcggtttttttgtttgcaagcagcagattacgcgcagaaaaaaaggatctcaagaagatcctttgatcttttctacggggtctgacgctcagtggaacgaaaactcacgttaagggattttggtcatgagattatcaaaaaggatcttcacctagatccttttaaattaaaaatgaagttttaaatcaatctaaagtatatatgagtaaacttggtctgacagttaccaatgcttaatcagtgaggcacctatctcagcgatctgtctatttcgttcatccatagttgcctgactccccgtcgtgtagataactacgatacgggagggcttaccatctggccccagtgctgcaatgataccgcgagacccacgctcaccggctccagatttatcagcaataaaccagccagccggaagggccgagcgcagaagtggtcctgcaactttatccgcctccatccagtctattaattgttgccgggaagctagagtaagtagttcgccagttaatagtttgcgcaacgttgttgccattgctacaggcatcgtggtgtcacgctcgtcgtttggtatggcttcattcagctccggttcccaacgatcaaggcgagttacatgatcccccatgttgtgcaaaaaagcggttagctccttcggtcctccgatcgttgtcagaagtaagttggccgcagtgttatcactcatggttatggcagcactgcataattctcttactgtcatgccatccgtaagatgcttttctgtgactggtgagtactcaaccaagtcattctgagaatagtgtatgcggcgaccgagttgctcttgcccggcgtcaatacgggataataccgcgccacatagcagaactttaaaagtgctcatcattggaaaacgttcttcggggcgaaaactctcaaggatcttaccgctgttgagatccagttcgatgtaacccactcgtgcacccaactgatcttcagcatcttttactttcaccagcgtttctgggtgagcaaaaacaggaaggcaaaatgccgcaaaaaagggaataagggcgacacggaaatgttgaatactcatactcttcctttttcaatattattgaagcatttatcagggttattgtctcatgagcggatacatatttgaatgtatttagaaaaataaacaaataggggttccgcgcacatttccccgaaaagtgccacctgacgtc

SEQ ID NO: 178 - DNA, 6462 bp, Artificial Sequence
  Synthetic
gacggatcgggagatctcccgatcccctatggtgcactctcagtacaatctgctctgatgccgcatagttaagccagtatctgctccctgcttgtgtgttggaggtcgctgagtagtgcgcgagcaaaatttaagctacaacaaggcaaggcttgaccgacaattgcatgaagaatctgcttagggttaggcgttttgcgctgcttcgcgatgtacgggccagatatacgcgttgacattgattattgactagttattaatagtaatcaattacggggtcattagttcatagcccatatatggagttccgcgttacataacttacggtaaatggcccgcctggctgaccgcccaacgacccccgcccattgacgtcaataatgacgtatgttcccatagtaacgccaatagggactttccattgacgtcaatgggtggagtatttacggtaaactgcccacttggcagtacatcaagtgtatcatatgccaagtacgccccctattgacgtcaatgacggtaaatggcccgcctggcattatgcccagtacatgaccttatgggactttcctacttggcagtacatctacgtattagtcatcgctattaccatggtgatgcggttttggcagtacatcaatgggcgtggatagcggtttgactcacggggatttccaagtctccaccccattgacgtcaatgggagtttgttttggcaccaaaatcaacgggactttccaaaatgtcgtaacaactccgccccattgacgcaaatgggcggtaggcgtgtacggtgggaggtctatataagcagagctctctggctaactagagaacccactgcttactggcttatcgaaattaatacgactcactatagggagacccaagctggctagcgtttaaacttaagcttggtaccgagctcggatccgccaccatgggcaaacggacagccgacggaagcgagttcgagtcaccgaaaaagaagcgaaaagttggctccggaatgctgaccgacaagcagaaggccaagctgaacgagttccgggacgtgttcatcgagtacccaatcatcaccacagtgttcaatgactttgatcggctgagactgggcaagggcctggccggagagaagccatgcatgctgctgaacggcgacaccggcacaggcaagaccgccctgatcaagcagtataaggagcggcacctgcctcagttcatcaacggcgtgatgaatcacccagtgctggtgtccagaatcccctctaaccctaccctggagagcacactggccgagctgctgaaggacctgggacaagtgggctccaccgagaggaagctgcgcatcaatggcacaaggctgaccacatccctgatcaagtgcctgaagacctgtggcacagagctgatcatcatcgatgagtttcaggagctgatcgagcacaatcagggcaagaagcggagagagatcgccaacaggctgaagtacatcaatgacgaggccggcgtgtctatcgtgctggtgggcatgccatgggccgagaagatcgcagatgagccacagtggagctcccgcctgctggtgaggcgccagctgccctatttcaagctgtctgagaaccctaagcactttgtgcagctgatcatcggcctggccaataggatgcctttcaccgagaagccaaagctgagcgagcaggccacagtgttcgccctgttttctctgagcaagggctgtttccgcaccctgaagtactttctggacgatgccgtgctgtatgccctgatggacaacgccaagacactgaccacaaagcacctggtgaaggccttcggcgtgctgtttccagatgtgcccaatctgtttaccctgcctgtggccgagatcacagccagcgaggtggagcggtactccctgtataagctggagtctgcccaggacgaggaccccttcatcgccaccaagtttacagatcagatgcctatctcccagctgctgagaaagtgagcggccgctcgagtctagagggcccgtttaaacccgctgatcagcctcgactgtgccttctagttgccagccatctgttgtttgcccctcccccgtgccttccttgaccctggaaggtgccactcccactgtcctttcctaataaaatgaggaaattgcatcgcattgtctgagtaggtgtcattctattctggggggtggggtggggcaggacagcaagggggaggattgggaagacaatagcaggcatgctggggatgcggtgggctctatggcttctgaggcggaaagaaccagctggggctctagggggtatccccacgcgccctgtagcggcgcattaagcgcggcgggtgtggtggttacgcgcagcgtgaccgctacacttgccagcgccctagcgcccgctcctttcgctttcttcccttcctttctcgccacgttcgccggctttccccgtcaagctctaaatcgggggctccctttagggttccgatttagtgctttacggcacctcgaccccaaaaaacttgattagggtgatggttcacgtagtgggccatcgccctgatagacggtttttcgccctttgacgttggagtccacgttctttaatagtggactcttgttccaaactggaacaacactcaaccctatctcggtctattcttttgatttataagggattttgccgatttcggcctattggttaaaaaatgagctgatttaacaaaaatttaacgcgaattaattctgtggaatgtgtgtcagttagggtgtggaaagtccccaggctccccagcaggcagaagtatgcaaagcatgcatctcaattagtcagcaaccaggtgtggaaagtccccaggctccccagcaggcagaagtatgcaaagcatgcatctcaattagtcagcaaccatagtcccgcccctaactccgcccatcccgcccctaactccgcccagttccgcccattctccgccccatggctgactaattttttttatttatgcagaggccgaggccgcctctgcctctgagctattccagaagtagtgaggaggcttttttggaggcctaggcttttgcaaaaagctcccgggagcttgtatatccattttcggatctgatcaagagacaggatgaggatcgtttcgcatgattgaacaagatggattgcacgcaggttctccggccgcttgggtggagaggctattcggctatgactgggcacaacagacaatcggctgctctgatgccgccgtgttccggctgtcagcgcaggggcgcccggttctttttgtcaagaccgacctgtccggtgccctgaatgaactgcaggacgaggcagcgcggctatcgtggctggccacgacgggcgttccttgcgcagctgtgctcgacgttgtcactgaagcgggaagggactggctgctattgggcgaagtgccggggcaggatctcctgtcatctcaccttgctcctgccgagaaagtatccatcatggctgatgcaatgcggcggctgcatacgcttgatccggctacctgcccattcgaccaccaagcgaaacatcgcatcgagcgagcacgtactcggatggaagccggtcttgtcgatcaggatgatctggacgaagagcatcaggggctcgcgccagccgaactgttcgccaggctcaaggcgcgcatgcccgacggcgaggatctcgtcgtgacccatggcgatgcctgcttgccgaatatcatggtggaaaatggccgcttttctggattcatcgactgtggccggctgggtgtggcggaccgctatcaggacatagcgttggctacccgtgatattgctgaagagcttggcggcgaatgggctgaccgcttcctcgtgctttacggtatcgccgctcccgattcgcagcgcatcgccttctatcgccttcttgacgagttcttctgagcgggactctggggttcgaaatgaccgaccaagcgacgcccaacctgccatcacgagatttcgattccaccgccgccttctatgaaaggttgggcttcggaatcgttttccgggacgccggctggatgatcctccagcgcggggatctcatgctggagttcttcgcccaccccaacttgtttattgcagcttataatggttacaaataaagcaatagcatcacaaatttcacaaataaagcatttttttcactgcattctagttgtggtttgtccaaactcatcaatgtatcttatcatgtctgtataccgtcgacctctagctagagcttggcgtaatcatggtcatagctgtttcctgtgtgaaattgttatccgctcacaattccacacaacatacgagccggaagcataaagtgtaaagcctggggtgcctaatgagtgagctaactcacattaattgcgttgcgctcactgcccgctttccagtcgggaaacctgtcgtgccagctgcattaatgaatcggccaacgcgcggggagaggcggtttgcgtattgggcgctcttccgcttcctcgctcactgactcgctgcgctcggtcgttcggctgcggcgagcggtatcagctcactcaaaggcggtaatacggttatccacagaatcaggggataacgcaggaaagaacatgtgagcaaaaggccagcaaaaggccaggaaccgtaaaaaggccgcgttgctggcgtttttccataggctccgcccccctgacgagcatcacaaaaatcgacgctcaagtcagaggtggcgaaacccgacaggactataaagataccaggcgtttccccctggaagctccctcgtgcgctctcctgttccgaccctgccgcttaccggatacctgtccgcctttctcccttcgggaagcgtggcgctttctcatagctcacgctgtaggtatctcagttcggtgtaggtcgttcgctccaagctgggctgtgtgcacgaaccccccgttcagcccgaccgctgcgccttatccggtaactatcgtcttgagtccaacccggtaagacacgacttatcgccactggcagcagccactggtaacaggattagcagagcgaggtatgtaggcggtgctacagagttcttgaagtggtggcctaactacggctacactagaagaacagtatttggtatctgcgctctgctgaagccagttaccttcggaaaaagagttggtagctcttgatccggcaaacaaaccaccgctggtagcggtttttttgtttgcaagcagcagattacgcgcagaaaaaaaggatctcaagaagatcctttgatcttttctacggggtctgacgctcagtggaacgaaaactcacgttaagggattttggtcatgagattatcaaaaaggatcttcacctagatccttttaaattaaaaatgaagttttaaatcaatctaaagtatatatgagtaaacttggtctgacagttaccaatgcttaatcagtgaggcacctatctcagcgatctgtctatttcgttcatccatagttgcctgactccccgtcgtgtagataactacgatacgggagggcttaccatctggccccagtgctgcaatgataccgcgagacccacgctcaccggctccagatttatcagcaataaaccagccagccggaagggccgagcgcagaagtggtcctgcaactttatccgcctccatccagtctattaattgttgccgggaagctagagtaagtagttcgccagttaatagtttgcgcaacgttgttgccattgctacaggcatcgtggtgtcacgctcgtcgtttggtatggcttcattcagctccggttcccaacgatcaaggcgagttacatgatcccccatgttgtgcaaaaaagcggttagctccttcggtcctccgatcgttgtcagaagtaagttggccgcagtgttatcactcatggttatggcagcactgcataattctcttactgtcatgccatccgtaagatgcttttctgtgactggtgagtactcaaccaagtcattctgagaatagtgtatgcggcgaccgagttgctcttgcccggcgtcaatacgggataataccgcgccacatagcagaactttaaaagtgctcatcattggaaaacgttcttcggggcgaaaactctcaaggatcttaccgctgttgagatccagttcgatgtaacccactcgtgcacccaactgatcttcagcatcttttactttcaccagcgtttctgggtgagcaaaaacaggaaggcaaaatgccgcaaaaaagggaataagggcgacacggaaatgttgaatactcatactcttcctttttcaatattattgaagcatttatcagggttattgtctcatgagcggatacatatttgaatgtatttagaaaaataaacaaataggggttccgcgcacatttccccgaaaagtgccacctgacgtc

SEQ ID NO: 179 - DNA, 4798 bp, Artificial Sequence
  Synthetic
ttgcccggcgtcaatacgggataataccgcgccacatagcagaactttaaaagtgctcatcattggaaaacgttcttcggggcgaaaactctcaaggatcttaccgctgttgagatccagttcgatgtaacccactcgtgcacccaactgatcttcagcatcttttactttcaccagcgtttctgggtgagcaaaaacaggaaggcaaaatgccgcaaaaaagggaataagggcgacacggaaatgttgaatactcatactcttcctttttcattattattgaagcatttatcagggttattgtctcatgagcggatacatatttgaatgtatttagaaaaataaacaaataggggttccgcgcacatttccccgaaaagtgccacctgacgtcgacggatcgggagatctcccgatcccctatggtcgactctcagtacaatctgctctgatgccgcatagttaagccagtatctgctccctgcttgtgtgttggaggtcgctgagtagtgcgcgagcaaaatttaagctacaacaaggcaaggcttgaccgacaattgcatgaagaatctgcttagggttaggcgttttgcgctgcttcgcgatgtacgggccagatatacgcgagggcctatttcccatgattccttcatatttgcatatacgatacaaggctgttagagagataattagaattaatttgactgtaaacacaaagatattagtacaaaatacgtgacgtagaaagtaataatttcttgggtagtttgcagttttaaaattatgttttaaaatggactatcatatgcttaccgtaacttgaaagtatttcgatttcttggctttatatatcttgtggaaaggacgaaacaccgtaatacgactcactatagggtctagaattcctgtgaactgccgagtaggcagctgaagttgcgaggtattcggctccgcgacggaggctaagtttaactgccgaaaaggcagaggctaaagtagcggccgctttttttcttctgaggcggaaagaaccagctggggctctagggggtatccccacgcgccctgtagcggcgcattaagcgcggcgggtgtggtggttacgcgcagcgtgaccgctacacttgccagcgccctagcgcccgctcctttcgctttcttcccttcctttctcgccacgttcgccggctttccccgtcaagctctaaatcgggggctccctttagggttccgatttagtgctttacggcacctcgaccccaaaaaacttgattagggtgatggttcacgtagtgggccatcgccctgatagacggtttttcgccctttgacgttggagtccacgttctttaatagtggactcttgttccaaactggaacaacactcaaccctatctcggtctattcttttgatttataagggattttgccgatttcggcctattggttaaaaaatgagctgatttaacaaaaatttaacgcgaattaattctgtggaatgtgtgtcagttagggtgtggaaagtccccaggctccccagcaggcagaagtatgcaaagcatgcatctcaattagtcagcaaccaggtgtggaaagtccccaggctccccagcaggcagaagtatgcaaagcatgcatctcaattagtcagcaaccatagtcccgcccctaactccgcccatcccgcccctaactccgcccagttccgcccattctccgccccatggctgactaattttttttatttatgcagaggccgaggccgcctctgcctctgagctattccagaagtagtgaggaggcttttttggaggcctaggcttttgcaaaaagctcccgggagcttgtatatccattttcggatctgatcaagagacaggatgaggatcgtttcgcatgattgaacaagatggattgcacgcaggttctccggccgcttgggtggagaggctattcggctatgactgggcacaacagacaatcggctgctctgatgccgccgtgttccggctgtcagcgcaggggcgcccggttctttttgtcaagaccgacctgtccggtgccctgaatgaactgcaggacgaggcagcgcggctatcgtggctggccacgacgggcgttccttgcgcagctgtgctcgacgttgtcactgaagcgggaagggactggctgctattgggcgaagtgccggggcaggatctcctgtcatctcaccttgctcctgccgagaaagtatccatcatggctgatgcaatgcggcggctgcatacgcttgatccggctacctgcccattcgaccaccaagcgaaacatcgcatcgagcgagcacgtactcggatggaagccggtcttgtcgatcaggatgatctggacgaagagcatcaggggctcgcgccagccgaactgttcgccaggctcaaggcgcgcatgcccgacggcgaggatctcgtcgtgacccatggcgatgcctgcttgccgaatatcatggtggaaaatggccgcttttctggattcatcgactgtggccggctgggtgtggcggaccgctatcaggacatagcgttggctacccgtgatattgctgaagagcttggcggcgaatgggctgaccgcttcctcgtgctttacggtatcgccgctcccgattcgcagcgcatcgccttctatcgccttcttgacgagttcttctgagcgggactctggggttcgaaatgaccgaccaagcgacgcccaacctgccatcacgagatttcgattccaccgccgccttctatgaaaggttgggcttcggaatcgttttccgggacgccggctggatgatcctccagcgcggggatctcatgctggagttcttcgcccaccccaacttgtttattgcagcttataatggttacaaataaagcaatagcatcacaaatttcacaaataaagcatttttttcactgcattctagttgtggtttgtccaaactcatcaatgtatcttatcatgtctgtataccgtcgacctctagctagagcttggcgtaatcatggtcatagctgtttcctgtgtgaaattgttatccgctcacaattccacacaacatacgagccggaagcataaagtgtaaagcctggggtgcctaatgagtgagctaactcacattaattgcgttgcgctcactgcccgctttccagtcgggaaacctgtcgtgccagctgcattaatgaatcggccaacgcgcggggagaggcggtttgcgtattgggcgctcttccgcttcctcgctcactgactcgctgcgctcggtcgttcggctgcggcgagcggtatcagctcactcaaaggcggtaatacggttatccacagaatcaggggataacgcaggaaagaacatgtgagcaaaaggccagcaaaaggccaggaaccgtaaaaaggccgcgttgctggcgtttttccataggctccgcccccctgacgagcatcacaaaaatcgacgctcaagtcagaggtggcgaaacccgacaggactataaagataccaggcgtttccccctggaagctccctcgtgcgctctcctgttccgaccctgccgcttaccggatacctgtccgcctttctcccttcgggaagcgtggcgctttctcaatgctcacgctgtaggtatctcagttcggtgtaggtcgttcgctccaagctgggctgtgtgcacgaaccccccgttcagcccgaccgctgcgccttatccggtaactatcgtcttgagtccaacccggtaagacacgacttatcgccactggcagcagccactggtaacaggattagcagagcgaggtatgtaggcggtgctacagagttcttgaagtggtggcctaactacggctacactagaaggacagtatttggtatctgcgctctgctgaagccagttaccttcggaaaaagagttggtagctcttgatccggcaaacaaaccaccgctggtagcggtggtttttttgtttgcaagcagcagattacgcgcagaaaaaaaggatctcaagaagatcctttgatcttttctacggggtctgacgctcagtggaacgaaaactcacgttaagggattttggtcatgagattatcaaaaaggatcttcacctagatccttttaaattaaaaatgaagttttaaatcaatctaaagtatatatgagtaaacttggtctgacagttaccaatgcttaatcagtgaggcacctatctcagcgatctgtctatttcgttcatccatagttgcctgactccccgtcgtgtagataactacgatacgggagggcttaccatctggccccagtgctgcaatgataccgcgagacccacgctcaccggctccagatttatcagcaataaaccagccagccggaagggccgagcgcagaagtggtcctgcaactttatccgcctccatccagtctattaattgttgccgggaagctagagtaagtagttcgccagttaatagtttgcgcaacgttgttgccattgctacaggcatcgtggtgtcacgctcgtcgtttggtatggcttcattcagctccggttcccaacgatcaaggcgagttacatgatcccccatgttgtgcaaaaaagcggttagctccttcggtcctccgatcgttgtcagaagtaagttggccgcagtgttatcactcatggttatggcagcactgcataattctcttactgtcatgccatccgtaagatgcttttctgtgactggtgagtactcaaccaagtcattctgagaatagtgtatgcggcgaccgagttgctc

SEQ ID NO: 180 - DNA, 4798 bp, Artificial Sequence
  Synthetic
ttgcccggcgtcaatacgggataataccgcgccacatagcagaactttaaaagtgctcatcattggaaaacgttcttcggggcgaaaactctcaaggatcttaccgctgttgagatccagttcgatgtaacccactcgtgcacccaactgatcttcagcatcttttactttcaccagcgtttctgggtgagcaaaaacaggaaggcaaaatgccgcaaaaaagggaataagggcgacacggaaatgttgaatactcatactcttcctttttcattattattgaagcatttatcagggttattgtctcatgagcggatacatatttgaatgtatttagaaaaataaacaaataggggttccgcgcacatttccccgaaaagtgccacctgacgtcgacggatcgggagatctcccgatcccctatggtcgactctcagtacaatctgctctgatgccgcatagttaagccagtatctgctccctgcttgtgtgttggaggtcgctgagtagtgcgcgagcaaaatttaagctacaacaaggcaaggcttgaccgacaattgcatgaagaatctgcttagggttaggcgttttgcgctgcttcgcgatgtacgggccagatatacgcgagggcctatttcccatgattccttcatatttgcatatacgatacaaggctgttagagagataattagaattaatttgactgtaaacacaaagatattagtacaaaatacgtgacgtagaaagtaataatttcttgggtagtttgcagttttaaaattatgttttaaaatggactatcatatgcttaccgtaacttgaaagtatttcgatttcttggctttatatatcttgtggaaaggacgaaacaccgtaatacgactcactatagggtctagaattcctgtgaactgccgagtaggcagctgaagttaatgcaggcaaatcaaccttagtctgaaggcctttaactgccgaaaaggcagaggctaaagtagcggccgctttttttcttctgaggcggaaagaaccagctggggctctagggggtatccccacgcgccctgtagcggcgcattaagcgcggcgggtgtggtggttacgcgcagcgtgaccgctacacttgccagcgccctagcgcccgctcctttcgctttcttcccttcctttctcgccacgttcgccggctttccccgtcaagctctaaatcgggggctccctttagggttccgatttagtgctttacggcacctcgaccccaaaaaacttgattagggtgatggttcacgtagtgggccatcgccctgatagacggtttttcgccctttgacgttggagtccacgttctttaatagtggactcttgttccaaactggaacaacactcaaccctatctcggtctattcttttgatttataagggattttgccgatttcggcctattggttaaaaaatgagctgatttaacaaaaatttaacgcgaattaattctgtggaatgtgtgtcagttagggtgtggaaagtccccaggctccccagcaggcagaagtatgcaaagcatgcatctcaattagtcagcaaccaggtgtggaaagtccccaggctccccagcaggcagaagtatgcaaagcatgcatctcaattagtcagcaaccatagtcccgcccctaactccgcccatcccgcccctaactccgcccagttccgcccattctccgccccatggctgactaattttttttatttatgcagaggccgaggccgcctctgcctctgagctattccagaagtagtgaggaggcttttttggaggcctaggcttttgcaaaaagctcccgggagcttgtatatccattttcggatctgatcaagagacaggatgaggatcgtttcgcatgattgaacaagatggattgcacgcaggttctccggccgcttgggtggagaggctattcggctatgactgggcacaacagacaatcggctgctctgatgccgccgtgttccggctgtcagcgcaggggcgcccggttctttttgtcaagaccgacctgtccggtgccctgaatgaactgcaggacgaggcagcgcggctatcgtggctggccacgacgggcgttccttgcgcagctgtgctcgacgttgtcactgaagcgggaagggactggctgctattgggcgaagtgccggggcaggatctcctgtcatctcaccttgctcctgccgagaaagtatccatcatggctgatgcaatgcggcggctgcatacgcttgatccggctacctgcccattcgaccaccaagcgaaacatcgcatcgagcgagcacgtactcggatggaagccggtcttgtcgatcaggatgatctggacgaagagcatcaggggctcgcgccagccgaactgttcgccaggctcaaggcgcgcatgcccgacggcgaggatctcgtcgtgacccatggcgatgcctgcttgccgaatatcatggtggaaaatggccgcttttctggattcatcgactgtggccggctgggtgtggcggaccgctatcaggacatagcgttggctacccgtgatattgctgaagagcttggcggcgaatgggctgaccgcttcctcgtgctttacggtatcgccgctcccgattcgcagcgcatcgccttctatcgccttcttgacgagttcttctgagcgggactctggggttcgaaatgaccgaccaagcgacgcccaacctgccatcacgagatttcgattccaccgccgccttctatgaaaggttgggcttcggaatcgttttccgggacgccggctggatgatcctccagcgcggggatctcatgctggagttcttcgcccaccccaacttgtttattgcagcttataatggttacaaataaagcaatagcatcacaaatttcacaaataaagcatttttttcactgcattctagttgtggtttgtccaaactcatcaatgtatcttatcatgtctgtataccgtcgacctctagctagagcttggcgtaatcatggtcatagctgtttcctgtgtgaaattgttatccgctcacaattccacacaacatacgagccggaagcataaagtgtaaagcctggggtgcctaatgagtgagctaactcacattaattgcgttgcgctcactgcccgctttccagtcgggaaacctgtcgtgccagctgcattaatgaatcggccaacgcgcggggagaggcggtttgcgtattgggcgctcttccgcttcctcgctcactgactcgctgcgctcggtcgttcggctgcggcgagcggtatcagctcactcaaaggcggtaatacggttatccacagaatcaggggataacgcaggaaagaacatgtgagcaaaaggccagcaaaaggccaggaaccgtaaaaaggccgcgttgctggcgtttttccataggctccgcccccctgacgagcatcacaaaaatcgacgctcaagtcagaggtggcgaaacccgacaggactataaagataccaggcgtttccccctggaagctccctcgtgcgctctcctgttccgaccctgccgcttaccggatacctgtccgcctttctcccttcgggaagcgtggcgctttctcaatgctcacgctgtaggtatctcagttcggtgtaggtcgttcgctccaagctgggctgtgtgcacgaaccccccgttcagcccgaccgctgcgccttatccggtaactatcgtcttgagtccaacccggtaagacacgacttatcgccactggcagcagccactggtaacaggattagcagagcgaggtatgtaggcggtgctacagagttcttgaagtggtggcctaactacggctacactagaaggacagtatttggtatctgcgctctgctgaagccagttaccttcggaaaaagagttggtagctcttgatccggcaaacaaaccaccgctggtagcggtggtttttttgtttgcaagcagcagattacgcgcagaaaaaaaggatctcaagaagatcctttgatcttttctacggggtctgacgctcagtggaacgaaaactcacgttaagggattttggtcatgagattatcaaaaaggatcttcacctagatccttttaaattaaaaatgaagttttaaatcaatctaaagtatatatgagtaaacttggtctgacagttaccaatgcttaatcagtgaggcacctatctcagcgatctgtctatttcgttcatccatagttgcctgactccccgtcgtgtagataactacgatacgggagggcttaccatctggccccagtgctgcaatgataccgcgagacccacgctcaccggctccagatttatcagcaataaaccagccagccggaagggccgagcgcagaagtggtcctgcaactttatccgcctccatccagtctattaattgttgccgggaagctagagtaagtagttcgccagttaatagtttgcgcaacgttgttgccattgctacaggcatcgtggtgtcacgctcgtcgtttggtatggcttcattcagctccggttcccaacgatcaaggcgagttacatgatcccccatgttgtgcaaaaaagcggttagctccttcggtcctccgatcgttgtcagaagtaagttggccgcagtgttatcactcatggttatggcagcactgcataattctcttactgtcatgccatccgtaagatgcttttctgtgactggtgagtactcaaccaagtcattctgagaatagtgtatgcggcgaccgagttgctc

SEQ ID NO: 181 - DNA, 6661 bp, Artificial Sequence
  Synthetic
gacggatcgggagatctcccgatcccctatggtgcactctcagtacaatctgctctgatgccgcatagttaagccagtatctgctccctgcttgtgtgttggaggtcgctgagtagtgcgcgagcaaaatttaagctacaacaaggcaaggcttgaccgacaattgcatgaagaatctgcttagggttaggcgttttgcgctgcttcgcgatgtacgggccagatatacgcgttgacattgattattgactagttattaatagtaatcaattacggggtcattagttcatagcccatatatggagttccgcgttacataacttacggtaaatggcccgcctggctgaccgcccaacgacccccgcccattgacgtcaataatgacgtatgttcccatagtaacgccaatagggactttccattgacgtcaatgggtggagtatttacggtaaactgcccacttggcagtacatcaagtgtatcatatgccaagtacgccccctattgacgtcaatgacggtaaatggcccgcctggcattatgcccagtacatgaccttatgggactttcctacttggcagtacatctacgtattagtcatcgctattaccatggtgatgcggttttggcagtacatcaatgggcgtggatagcggtttgactcacggggatttccaagtctccaccccattgacgtcaatgggagtttgttttggcaccaaaatcaacgggactttccaaaatgtcgtaacaactccgccccattgacgcaaatgggcggtaggcgtgtacggtgggaggtctatataagcagagctctctggctaactagagaacccactgcttactggcttatcgaaattaatacgactcactatagggagacccaagctggctagcgtttaaacttaagcttggtaccgagctcggccaccatgggcctgaccgacaagcagaaggccaagctgaacgagttccgggacgtgttcatcgagtacccaatcatcaccacagtgttcaatgactttgatcggctgagactgggcaagggcctggccggagagaagccatgcatgctgctgaacggcgacaccggcacaggcaagaccgccctgatcaagcagtataaggagcggcacctgcctcagttcatcaacggcgtgatgaatcacccagtgctggtgtccagaatcccctctaaccctaccctggagagcacactggccgagctgctgaaggacctgggacaagtgggctccaccgagaggaagctgcgcatcaatggcacaaggctgaccacatccctgatcaagtgcctgaagacctgtggcacagagctgatcatcatcgatgagtttcaggagctgatcgagcacaatcagggcaagaagcggagagagatcgccaacaggctgaagtacatcaatgacgaggccggcgtgtctatcgtgctggtgggcatgccatgggccgagaagatcgcagatgagccacagtggagctcccgcctgctggtgaggcgccagctgccctatttcaagctgtctgagaaccctaagcactttgtgcagctgatcatcggcctggccaataggatgcctttcaccgagaagccaaagctgagcgagcaggccacagtgttcgccctgttttctctgagcaagggctgtttccgcaccctgaagtactttctggacgatgccgtgctgtatgccctgatggacaacgccaagacactgaccacaaagcacctggtgaaggccttcggcgtgctgtttccagatgtgcccaatctgtttaccctgcctgtggccgagatcacagccagcgaggtggagcggtactccctgtataagctggagtctgcccaggacgaggaccccttcatcgccaccaagtttacagatcagatgcctatctcccagctgctgagaaagggctccggaaaacggacagccgacggaagcgagttcgagtcaccgaaaaagaagcgaaaagttggtggtagtggtggaagcggcgaggccagcggttccggacgggctgacgcattggacgattttgatctggatatgctgggaagtgacgccctcgatgattttgaccttgacatgcttggttcggatgcccttgatgactttgacctcgacatgctcggcagtgacgcccttgatgatttcgacctggacatgctgattaactctagatgagcggccgctcgagtctagagggcccgtttaaacccgctgatcagcctcgactgtgccttctagttgccagccatctgttgtttgcccctcccccgtgccttccttgaccctggaaggtgccactcccactgtcctttcctaataaaatgaggaaattgcatcgcattgtctgagtaggtgtcattctattctggggggtggggtggggcaggacagcaagggggaggattgggaagacaatagcaggcatgctggggatgcggtgggctctatggcttctgaggcggaaagaaccagctggggctctagggggtatccccacgcgccctgtagcggcgcattaagcgcggcgggtgtggtggttacgcgcagcgtgaccgctacacttgccagcgccctagcgcccgctcctttcgctttcttcccttcctttctcgccacgttcgccggctttccccgtcaagctctaaatcgggggctccctttagggttccgatttagtgctttacggcacctcgaccccaaaaaacttgattagggtgatggttcacgtagtgggccatcgccctgatagacggtttttcgccctttgacgttggagtccacgttctttaatagtggactcttgttccaaactggaacaacactcaaccctatctcggtctattcttttgatttataagggattttgccgatttcggcctattggttaaaaaatgagctgatttaacaaaaatttaacgcgaattaattctgtggaatgtgtgtcagttagggtgtggaaagtccccaggctccccagcaggcagaagtatgcaaagcatgcatctcaattagtcagcaaccaggtgtggaaagtccccaggctccccagcaggcagaagtatgcaaagcatgcatctcaattagtcagcaaccatagtcccgcccctaactccgcccatcccgcccctaactccgcccagttccgcccattctccgccccatggctgactaattttttttatttatgcagaggccgaggccgcctctgcctctgagctattccagaagtagtgaggaggcttttttggaggcctaggcttttgcaaaaagctcccgggagcttgtatatccattttcggatctgatcaagagacaggatgaggatcgtttcgcatgattgaacaagatggattgcacgcaggttctccggccgcttgggtggagaggctattcggctatgactgggcacaacagacaatcggctgctctgatgccgccgtgttccggctgtcagcgcaggggcgcccggttctttttgtcaagaccgacctgtccggtgccctgaatgaactgcaggacgaggcagcgcggctatcgtggctggccacgacgggcgttccttgcgcagctgtgctcgacgttgtcactgaagcgggaagggactggctgctattgggcgaagtgccggggcaggatctcctgtcatctcaccttgctcctgccgagaaagtatccatcatggctgatgcaatgcggcggctgcatacgcttgatccggctacctgcccattcgaccaccaagcgaaacatcgcatcgagcgagcacgtactcggatggaagccggtcttgtcgatcaggatgatctggacgaagagcatcaggggctcgcgccagccgaactgttcgccaggctcaaggcgcgcatgcccgacggcgaggatctcgtcgtgacccatggcgatgcctgcttgccgaatatcatggtggaaaatggccgcttttctggattcatcgactgtggccggctgggtgtggcggaccgctatcaggacatagcgttggctacccgtgatattgctgaagagcttggcggcgaatgggctgaccgcttcctcgtgctttacggtatcgccgctcccgattcgcagcgcatcgccttctatcgccttcttgacgagttcttctgagcgggactctggggttcgaaatgaccgaccaagcgacgcccaacctgccatcacgagatttcgattccaccgccgccttctatgaaaggttgggcttcggaatcgttttccgggacgccggctggatgatcctccagcgcggggatctcatgctggagttcttcgcccaccccaacttgtttattgcagcttataatggttacaaataaagcaatagcatcacaaatttcacaaataaagcatttttttcactgcattctagttgtggtttgtccaaactcatcaatgtatcttatcatgtctgtataccgtcgacctctagctagagcttggcgtaatcatggtcatagctgtttcctgtgtgaaattgttatccgctcacaattccacacaacatacgagccggaagcataaagtgtaaagcctggggtgcctaatgagtgagctaactcacattaattgcgttgcgctcactgcccgctttccagtcgggaaacctgtcgtgccagctgcattaatgaatcggccaacgcgcggggagaggcggtttgcgtattgggcgctcttccgcttcctcgctcactgactcgctgcgctcggtcgttcggctgcggcgagcggtatcagctcactcaaaggcggtaatacggttatccacagaatcaggggataacgcaggaaagaacatgtgagcaaaaggccagcaaaaggccaggaaccgtaaaaaggccgcgttgctggcgtttttccataggctccgcccccctgacgagcatcacaaaaatcgacgctcaagtcagaggtggcgaaacccgacaggactataaagataccaggcgtttccccctggaagctccctcgtgcgctctcctgttccgaccctgccgcttaccggatacctgtccgcctttctcccttcgggaagcgtggcgctttctcatagctcacgctgtaggtatctcagttcggtgtaggtcgttcgctccaagctgggctgtgtgcacgaaccccccgttcagcccgaccgctgcgccttatccggtaactatcgtcttgagtccaacccggtaagacacgacttatcgccactggcagcagccactggtaacaggattagcagagcgaggtatgtaggcggtgctacagagttcttgaagtggtggcctaactacggctacactagaagaacagtatttggtatctgcgctctgctgaagccagttaccttcggaaaaagagttggtagctcttgatccggcaaacaaaccaccgctggtagcggtttttttgtttgcaagcagcagattacgcgcagaaaaaaaggatctcaagaagatcctttgatcttttctacggggtctgacgctcagtggaacgaaaactcacgttaagggattttggtcatgagattatcaaaaaggatcttcacctagatccttttaaattaaaaatgaagttttaaatcaatctaaagtatatatgagtaaacttggtctgacagttaccaatgcttaatcagtgaggcacctatctcagcgatctgtctatttcgttcatccatagttgcctgactccccgtcgtgtagataactacgatacgggagggcttaccatctggccccagtgctgcaatgataccgcgagacccacgctcaccggctccagatttatcagcaataaaccagccagccggaagggccgagcgcagaagtggtcctgcaactttatccgcctccatccagtctattaattgttgccgggaagctagagtaagtagttcgccagttaatagtttgcgcaacgttgttgccattgctacaggcatcgtggtgtcacgctcgtcgtttggtatggcttcattcagctccggttcccaacgatcaaggcgagttacatgatcccccatgttgtgcaaaaaagcggttagctccttcggtcctccgatcgttgtcagaagtaagttggccgcagtgttatcactcatggttatggcagcactgcataattctcttactgtcatgccatccgtaagatgcttttctgtgactggtgagtactcaaccaagtcattctgagaatagtgtatgcggcgaccgagttgctcttgcccggcgtcaatacgggataataccgcgccacatagcagaactttaaaagtgctcatcattggaaaacgttcttcggggcgaaaactctcaaggatcttaccgctgttgagatccagttcgatgtaacccactcgtgcacccaactgatcttcagcatcttttactttcaccagcgtttctgggtgagcaaaaacaggaaggcaaaatgccgcaaaaaagggaataagggcgacacggaaatgttgaatactcatactcttcctttttcaatattattgaagcatttatcagggttattgtctcatgagcggatacatatttgaatgtatttagaaaaataaacaaataggggttccgcgcacatttccccgaaaagtgccacctgacgtc

SEQ ID NO: 182 - DNA, 6678 bp, Artificial Sequence
  Synthetic
gacggatcgggagatctcccgatcccctatggtgcactctcagtacaatctgctctgatgccgcatagttaagccagtatctgctccctgcttgtgtgttggaggtcgctgagtagtgcgcgagcaaaatttaagctacaacaaggcaaggcttgaccgacaattgcatgaagaatctgcttagggttaggcgttttgcgctgcttcgcgatgtacgggccagatatacgcgttgacattgattattgactagttattaatagtaatcaattacggggtcattagttcatagcccatatatggagttccgcgttacataacttacggtaaatggcccgcctggctgaccgcccaacgacccccgcccattgacgtcaataatgacgtatgttcccatagtaacgccaatagggactttccattgacgtcaatgggtggagtatttacggtaaactgcccacttggcagtacatcaagtgtatcatatgccaagtacgccccctattgacgtcaatgacggtaaatggcccgcctggcattatgcccagtacatgaccttatgggactttcctacttggcagtacatctacgtattagtcatcgctattaccatggtgatgcggttttggcagtacatcaatgggcgtggatagcggtttgactcacggggatttccaagtctccaccccattgacgtcaatgggagtttgttttggcaccaaaatcaacgggactttccaaaatgtcgtaacaactccgccccattgacgcaaatgggcggtaggcgtgtacggtgggaggtctatataagcagagctctctggctaactagagaacccactgcttactggcttatcgaaattaatacgactcactatagggagacccaagctggctagcgtttaaacttaagcttggtaccgagctcggatccgccaccatgggcaaacggacagccgacggaagcgagttcgagtcaccgaaaaagaagcgaaaagttggctccggaatgtttctgatccaccccgagaagcactatcaggacgagagcctggagtccttcctgatccggctgtgcgagtgtaacggcttcgagtcttttagactgctgagcggcgccctgtgggagtggctggtggacaacgatcaccaggcagcaggcgccctgagccggcagctgtgcgagatcaatctgtaccacgccaagcacagctccggcttccgggtgagagcctttgagctgctggattccctgtttaagggaaacgcccggcccctgatgcagcacgccctgctgcactccgccgtgaccttttctcctaatctgacaagcgtgttcagagccggcatccacatcccaaggtgcttcctgcgccagagctacacccccgtgtgccctgcctgtctgacagaggccccatacatccggcagtattggcacctgaagccctatcagtcctgtcacagacacggcgtggccatgctgtttcactgcccttcttgtagcgccgtgctgaattaccaggacaccgagcagatcgagacatgctcctgtggcttcgacctgcgggatgcaggcaccaacgtggcctctagcgagcagatcgccatctctcagctggtggtggagggcgagatgcagaatgccctgtccatctctcactggctgggcgccctgctgtggttttaccggtataagcagtctcagctgagcctgaacgtggtgaaggagcccgagttcggcagggccgtggagtacttcagccagtggcctaatgccttcgtgcgcgatctgcacgagctggccacccaggccgagatgaagctggtgcggggcttcaaccacacaagattctccgaggtgtttggcgacctgctgtcctctagcaggaagctgccatcctctgatacccagcagaacttcatcctgaaggccgtgatcgacttcctgcagcagctggtgcgcgataaccccaaggccaaggagaccaatatcgccgacgtgaagctgacagtggtggaggccgccgccctgctgaccacaagcacagagcaggtgtacaggctgtatgaggagggctacctgcagagctccgtgcgcttcaagctgcactccaagctgtctcctaacgatgccgtgttctttctgaggcacgtggtggagctgcgcatggcaggaatggccagcgactactccgccaatgacgtgtacctgccaagctggtgagcggccgctcgagtctagagggcccgtttaaacccgctgatcagcctcgactgtgccttctagttgccagccatctgttgtttgcccctcccccgtgccttccttgaccctggaaggtgccactcccactgtcctttcctaataaaatgaggaaattgcatcgcattgtctgagtaggtgtcattctattctggggggtggggtggggcaggacagcaagggggaggattgggaagacaatagcaggcatgctggggatgcggtgggctctatggcttctgaggcggaaagaaccagctggggctctagggggtatccccacgcgccctgtagcggcgcattaagcgcggcgggtgtggtggttacgcgcagcgtgaccgctacacttgccagcgccctagcgcccgctcctttcgctttcttcccttcctttctcgccacgttcgccggctttccccgtcaagctctaaatcgggggctccctttagggttccgatttagtgctttacggcacctcgaccccaaaaaacttgattagggtgatggttcacgtagtgggccatcgccctgatagacggtttttcgccctttgacgttggagtccacgttctttaatagtggactcttgttccaaactggaacaacactcaaccctatctcggtctattcttttgatttataagggattttgccgatttcggcctattggttaaaaaatgagctgatttaacaaaaatttaacgcgaattaattctgtggaatgtgtgtcagttagggtgtggaaagtccccaggctccccagcaggcagaagtatgcaaagcatgcatctcaattagtcagcaaccaggtgtggaaagtccccaggctccccagcaggcagaagtatgcaaagcatgcatctcaattagtcagcaaccatagtcccgcccctaactccgcccatcccgcccctaactccgcccagttccgcccattctccgccccatggctgactaattttttttatttatgcagaggccgaggccgcctctgcctctgagctattccagaagtagtgaggaggcttttttggaggcctaggcttttgcaaaaagctcccgggagcttgtatatccattttcggatctgatcaagagacaggatgaggatcgtttcgcatgattgaacaagatggattgcacgcaggttctccggccgcttgggtggagaggctattcggctatgactgggcacaacagacaatcggctgctctgatgccgccgtgttccggctgtcagcgcaggggcgcccggttctttttgtcaagaccgacctgtccggtgccctgaatgaactgcaggacgaggcagcgcggctatcgtggctggccacgacgggcgttccttgcgcagctgtgctcgacgttgtcactgaagcgggaagggactggctgctattgggcgaagtgccggggcaggatctcctgtcatctcaccttgctcctgccgagaaagtatccatcatggctgatgcaatgcggcggctgcatacgcttgatccggctacctgcccattcgaccaccaagcgaaacatcgcatcgagcgagcacgtactcggatggaagccggtcttgtcgatcaggatgatctggacgaagagcatcaggggctcgcgccagccgaactgttcgccaggctcaaggcgcgcatgcccgacggcgaggatctcgtcgtgacccatggcgatgcctgcttgccgaatatcatggtggaaaatggccgcttttctggattcatcgactgtggccggctgggtgtggcggaccgctatcaggacatagcgttggctacccgtgatattgctgaagagcttggcggcgaatgggctgaccgcttcctcgtgctttacggtatcgccgctcccgattcgcagcgcatcgccttctatcgccttcttgacgagttcttctgagcgggactctggggttcgaaatgaccgaccaagcgacgcccaacctgccatcacgagatttcgattccaccgccgccttctatgaaaggttgggcttcggaatcgttttccgggacgccggctggatgatcctccagcgcggggatctcatgctggagttcttcgcccaccccaacttgtttattgcagcttataatggttacaaataaagcaatagcatcacaaatttcacaaataaagcatttttttcactgcattctagttgtggtttgtccaaactcatcaatgtatcttatcatgtctgtataccgtcgacctctagctagagcttggcgtaatcatggtcatagctgtttcctgtgtgaaattgttatccgctcacaattccacacaacatacgagccggaagcataaagtgtaaagcctggggtgcctaatgagtgagctaactcacattaattgcgttgcgctcactgcccgctttccagtcgggaaacctgtcgtgccagctgcattaatgaatcggccaacgcgcggggagaggcggtttgcgtattgggcgctcttccgcttcctcgctcactgactcgctgcgctcggtcgttcggctgcggcgagcggtatcagctcactcaaaggcggtaatacggttatccacagaatcaggggataacgcaggaaagaacatgtgagcaaaaggccagcaaaaggccaggaaccgtaaaaaggccgcgttgctggcgtttttccataggctccgcccccctgacgagcatcacaaaaatcgacgctcaagtcagaggtggcgaaacccgacaggactataaagataccaggcgtttccccctggaagctccctcgtgcgctctcctgttccgaccctgccgcttaccggatacctgtccgcctttctcccttcgggaagcgtggcgctttctcatagctcacgctgtaggtatctcagttcggtgtaggtcgttcgctccaagctgggctgtgtgcacgaaccccccgttcagcccgaccgctgcgccttatccggtaactatcgtcttgagtccaacccggtaagacacgacttatcgccactggcagcagccactggtaacaggattagcagagcgaggtatgtaggcggtgctacagagttcttgaagtggtggcctaactacggctacactagaagaacagtatttggtatctgcgctctgctgaagccagttaccttcggaaaaagagttggtagctcttgatccggcaaacaaaccaccgctggtagcggtttttttgtttgcaagcagcagattacgcgcagaaaaaaaggatctcaagaagatcctttgatcttttctacggggtctgacgctcagtggaacgaaaactcacgttaagggattttggtcatgagattatcaaaaaggatcttcacctagatccttttaaattaaaaatgaagttttaaatcaatctaaagtatatatgagtaaacttggtctgacagttaccaatgcttaatcagtgaggcacctatctcagcgatctgtctatttcgttcatccatagttgcctgactccccgtcgtgtagataactacgatacgggagggcttaccatctggccccagtgctgcaatgataccgcgagacccacgctcaccggctccagatttatcagcaataaaccagccagccggaagggccgagcgcagaagtggtcctgcaactttatccgcctccatccagtctattaattgttgccgggaagctagagtaagtagttcgccagttaatagtttgcgcaacgttgttgccattgctacaggcatcgtggtgtcacgctcgtcgtttggtatggcttcattcagctccggttcccaacgatcaaggcgagttacatgatcccccatgttgtgcaaaaaagcggttagctccttcggtcctccgatcgttgtcagaagtaagttggccgcagtgttatcactcatggttatggcagcactgcataattctcttactgtcatgccatccgtaagatgcttttctgtgactggtgagtactcaaccaagtcattctgagaatagtgtatgcggcgaccgagttgctcttgcccggcgtcaatacgggataataccgcgccacatagcagaactttaaaagtgctcatcattggaaaacgttcttcggggcgaaaactctcaaggatcttaccgctgttgagatccagttcgatgtaacccactcgtgcacccaactgatcttcagcatcttttactttcaccagcgtttctgggtgagcaaaaacaggaaggcaaaatgccgcaaaaaagggaataagggcgacacggaaatgttgaatactcatactcttcctttttcaatattattgaagcatttatcagggttattgtctcatgagcggatacatatttgaatgtatttagaaaaataaacaaataggggttccgcgcacatttccccgaaaagtgccacctgacgtc

SEQ ID NO: 183 - DNA, 7536 bp, Artificial Sequence
  Synthetic
gacggatcgggagatctcccgatcccctatggtgcactctcagtacaatctgctctgatgccgcatagttaagccagtatctgctccctgcttgtgtgttggaggtcgctgagtagtgcgcgagcaaaatttaagctacaacaaggcaaggcttgaccgacaattgcatgaagaatctgcttagggttaggcgttttgcgctgcttcgcgatgtacgggccagatatacgcgttgacattgattattgactagttattaatagtaatcaattacggggtcattagttcatagcccatatatggagttccgcgttacataacttacggtaaatggcccgcctggctgaccgcccaacgacccccgcccattgacgtcaataatgacgtatgttcccatagtaacgccaatagggactttccattgacgtcaatgggtggagtatttacggtaaactgcccacttggcagtacatcaagtgtatcatatgccaagtacgccccctattgacgtcaatgacggtaaatggcccgcctggcattatgcccagtacatgaccttatgggactttcctacttggcagtacatctacgtattagtcatcgctattaccatggtgatgcggttttggcagtacatcaatgggcgtggatagcggtttgactcacggggatttccaagtctccaccccattgacgtcaatgggagtttgttttggcaccaaaatcaacgggactttccaaaatgtcgtaacaactccgccccattgacgcaaatgggcggtaggcgtgtacggtgggaggtctatataagcagagctctctggctaactagagaacccactgcttactggcttatcgaaattaatacgactcactatagggagacccaagctggctagcgtttaaacttaagcttggtaccgagctcggatccgccaccatgggcaaacggacagccgacggaagcgagttcgagtcaccgaaaaagaagcgaaaagttggctccggaatggtgagatccatgcacctgtctgagctgctgctggtgcaggataccgaggagaggaaccagctgctgcgcaaggccctggccccatacacctgcctggtggacgtgacaggctatgagagacagctgctgatgatcgccatcaatatcacagtgcccaggaaggatgtggacgatgtgctggacaagaagctggccaagagcctgctgaccaacacaaagcacctgcagaggtgcatcgatgaggtgcagtggttccacacccacaatgtgaagtacccagacagccgggtgaagggccagagaatcatctccctgaagcaggatgaggtggacggcgtgctgtgctccgccaacctgcctagctccctgggatgggcccacaactctagccaagtgaatccagccaagttcttttctatcagattcatctggcagggcagggccatgagcctgctggagacagtgatcgatgccccttccgagtggaaggtggcctttcgctctctgggcatcatcaagaagcagctgtctgagttccgggagattttcagcacctactatacatcctctcagatcccatccgaggtgtctgactacagcacccagatcagagtgccatatcagggctactattgtgccctgacacccgtgatctcccactctgtgcagagcaagatccagaagatggccttcggcaggaaggtgaagagctccaatgtggagcaccaccaccctgcctccgtgggctctctggtggccgccctgggaggaaacatccgcgtgctggattacccccctaatgtgcggcagaagaccagcgaggccttttccctgtatcgcgccgtgagcgagaaggaggtgttcgatcactccatcatcaaggagaagagatttctggacgccctgtccaggatcgcaggagagaaccctaccccaacactgcgccagcggagacagctgcgggtgtctgccctgaggttcgtgcgcaagcagctggccctgtggctggcccccatgatggagtggagggactccatcggaggagagagccggcactcccctatcgagaccctggaggagcagctgctgtacctgccaatcgcccacctgcccgatgtgctgtctgacctgaatacaagattccaccaggccctgcagtatcacaggaggggagcaagatacgcctatcaccctgaggtgctgtttccaatcaagcagcagctgaagtggctgctgcgctacatggccaaccagcaggatgccctgatcacccccgagcctaattgcgtgtatctgcacctgcagcagctggtggtgcacgacgcctctctgctgagcaacccctacgtgagcggcatccctgccctgacagccctgggaggactgatgcacaattatcagcggagactgtccgccctgatggagtgcgagtgtctgatccagcggggcgcctggtttatcgcccactaccaccagcagaagatcaagaagctgccagagcccgataaggtgaggtatctgaagaagcgcagcgacgtgcagaggccaggaatcaccgatggcaagtacggcgacctgacaatgaacctggtgctggagctgcagctgccagagagcgtgtccatccccgagctgtctctgctgcaggcagcattccctagcaggtttgcaggaggcaccctgcacccaccctccctgttcgagcagacagattggctgtccgtgtactctaaccagagcgagctgttttccgtgctggccaggctgccacggagcggctgttgggtgtatcctgacgataagggcgtgtctagcttcgacgagctggcctctcgcctggacaatgatcctgacctgaagccagtgggcctgggctttatccccctggaggagcctcactgcagggtgggcagcatcgcaccttaccactgctatgtggagccatgtatcggcgtggtgagatgtatgaaccccatcaatgtgaggctgtctggcagccagcagttctaccagtccgccttctggcactttgatatcgccaatgacgccatgctgatgaagaaggccacctgagcggccgctcgagtctagagggcccgtttaaacccgctgatcagcctcgactgtgccttctagttgccagccatctgttgtttgcccctcccccgtgccttccttgaccctggaaggtgccactcccactgtcctttcctaataaaatgaggaaattgcatcgcattgtctgagtaggtgtcattctattctggggggtggggtggggcaggacagcaagggggaggattgggaagacaatagcaggcatgctggggatgcggtgggctctatggcttctgaggcggaaagaaccagctggggctctagggggtatccccacgcgccctgtagcggcgcattaagcgcggcgggtgtggtggttacgcgcagcgtgaccgctacacttgccagcgccctagcgcccgctcctttcgctttcttcccttcctttctcgccacgttcgccggctttccccgtcaagctctaaatcgggggctccctttagggttccgatttagtgctttacggcacctcgaccccaaaaaacttgattagggtgatggttcacgtagtgggccatcgccctgatagacggtttttcgccctttgacgttggagtccacgttctttaatagtggactcttgttccaaactggaacaacactcaaccctatctcggtctattcttttgatttataagggattttgccgatttcggcctattggttaaaaaatgagctgatttaacaaaaatttaacgcgaattaattctgtggaatgtgtgtcagttagggtgtggaaagtccccaggctccccagcaggcagaagtatgcaaagcatgcatctcaattagtcagcaaccaggtgtggaaagtccccaggctccccagcaggcagaagtatgcaaagcatgcatctcaattagtcagcaaccatagtcccgcccctaactccgcccatcccgcccctaactccgcccagttccgcccattctccgccccatggctgactaattttttttatttatgcagaggccgaggccgcctctgcctctgagctattccagaagtagtgaggaggcttttttggaggcctaggcttttgcaaaaagctcccgggagcttgtatatccattttcggatctgatcaagagacaggatgaggatcgtttcgcatgattgaacaagatggattgcacgcaggttctccggccgcttgggtggagaggctattcggctatgactgggcacaacagacaatcggctgctctgatgccgccgtgttccggctgtcagcgcaggggcgcccggttctttttgtcaagaccgacctgtccggtgccctgaatgaactgcaggacgaggcagcgcggctatcgtggctggccacgacgggcgttccttgcgcagctgtgctcgacgttgtcactgaagcgggaagggactggctgctattgggcgaagtgccggggcaggatctcctgtcatctcaccttgctcctgccgagaaagtatccatcatggctgatgcaatgcggcggctgcatacgcttgatccggctacctgcccattcgaccaccaagcgaaacatcgcatcgagcgagcacgtactcggatggaagccggtcttgtcgatcaggatgatctggacgaagagcatcaggggctcgcgccagccgaactgttcgccaggctcaaggcgcgcatgcccgacggcgaggatctcgtcgtgacccatggcgatgcctgcttgccgaatatcatggtggaaaatggccgcttttctggattcatcgactgtggccggctgggtgtggcggaccgctatcaggacatagcgttggctacccgtgatattgctgaagagcttggcggcgaatgggctgaccgcttcctcgtgctttacggtatcgccgctcccgattcgcagcgcatcgccttctatcgccttcttgacgagttcttctgagcgggactctggggttcgaaatgaccgaccaagcgacgcccaacctgccatcacgagatttcgattccaccgccgccttctatgaaaggttgggcttcggaatcgttttccgggacgccggctggatgatcctccagcgcggggatctcatgctggagttcttcgcccaccccaacttgtttattgcagcttataatggttacaaataaagcaatagcatcacaaatttcacaaataaagcatttttttcactgcattctagttgtggtttgtccaaactcatcaatgtatcttatcatgtctgtataccgtcgacctctagctagagcttggcgtaatcatggtcatagctgtttcctgtgtgaaattgttatccgctcacaattccacacaacatacgagccggaagcataaagtgtaaagcctggggtgcctaatgagtgagctaactcacattaattgcgttgcgctcactgcccgctttccagtcgggaaacctgtcgtgccagctgcattaatgaatcggccaacgcgcggggagaggcggtttgcgtattgggcgctcttccgcttcctcgctcactgactcgctgcgctcggtcgttcggctgcggcgagcggtatcagctcactcaaaggcggtaatacggttatccacagaatcaggggataacgcaggaaagaacatgtgagcaaaaggccagcaaaaggccaggaaccgtaaaaaggccgcgttgctggcgtttttccataggctccgcccccctgacgagcatcacaaaaatcgacgctcaagtcagaggtggcgaaacccgacaggactataaagataccaggcgtttccccctggaagctccctcgtgcgctctcctgttccgaccctgccgcttaccggatacctgtccgcctttctcccttcgggaagcgtggcgctttctcatagctcacgctgtaggtatctcagttcggtgtaggtcgttcgctccaagctgggctgtgtgcacgaaccccccgttcagcccgaccgctgcgccttatccggtaactatcgtcttgagtccaacccggtaagacacgacttatcgccactggcagcagccactggtaacaggattagcagagcgaggtatgtaggcggtgctacagagttcttgaagtggtggcctaactacggctacactagaagaacagtatttggtatctgcgctctgctgaagccagttaccttcggaaaaagagttggtagctcttgatccggcaaacaaaccaccgctggtagcggtttttttgtttgcaagcagcagattacgcgcagaaaaaaaggatctcaagaagatcctttgatcttttctacggggtctgacgctcagtggaacgaaaactcacgttaagggattttggtcatgagattatcaaaaaggatcttcacctagatccttttaaattaaaaatgaagttttaaatcaatctaaagtatatatgagtaaacttggtctgacagttaccaatgcttaatcagtgaggcacctatctcagcgatctgtctatttcgttcatccatagttgcctgactccccgtcgtgtagataactacgatacgggagggcttaccatctggccccagtgctgcaatgataccgcgagacccacgctcaccggctccagatttatcagcaataaaccagccagccggaagggccgagcgcagaagtggtcctgcaactttatccgcctccatccagtctattaattgttgccgggaagctagagtaagtagttcgccagttaatagtttgcgcaacgttgttgccattgctacaggcatcgtggtgtcacgctcgtcgtttggtatggcttcattcagctccggttcccaacgatcaaggcgagttacatgatcccccatgttgtgcaaaaaagcggttagctccttcggtcctccgatcgttgtcagaagtaagttggccgcagtgttatcactcatggttatggcagcactgcataattctcttactgtcatgccatccgtaagatgcttttctgtgactggtgagtactcaaccaagtcattctgagaatagtgtatgcggcgaccgagttgctcttgcccggcgtcaatacgggataataccgcgccacatagcagaactttaaaagtgctcatcattggaaaacgttcttcggggcgaaaactctcaaggatcttaccgctgttgagatccagttcgatgtaacccactcgtgcacccaactgatcttcagcatcttttactttcaccagcgtttctgggtgagcaaaaacaggaaggcaaaatgccgcaaaaaagggaataagggcgacacggaaatgttgaatactcatactcttcctttttcaatattattgaagcatttatcagggttattgtctcatgagcggatacatatttgaatgtatttagaaaaataaacaaataggggttccgcgcacatttccccgaaaagtgccacctgacgtc

SEQ ID NO: 184 - DNA, 6495 bp, Artificial Sequence
  Synthetic
gacggatcgggagatctcccgatcccctatggtgcactctcagtacaatctgctctgatgccgcatagttaagccagtatctgctccctgcttgtgtgttggaggtcgctgagtagtgcgcgagcaaaatttaagctacaacaaggcaaggcttgaccgacaattgcatgaagaatctgcttagggttaggcgttttgcgctgcttcgcgatgtacgggccagatatacgcgttgacattgattattgactagttattaatagtaatcaattacggggtcattagttcatagcccatatatggagttccgcgttacataacttacggtaaatggcccgcctggctgaccgcccaacgacccccgcccattgacgtcaataatgacgtatgttcccatagtaacgccaatagggactttccattgacgtcaatgggtggagtatttacggtaaactgcccacttggcagtacatcaagtgtatcatatgccaagtacgccccctattgacgtcaatgacggtaaatggcccgcctggcattatgcccagtacatgaccttatgggactttcctacttggcagtacatctacgtattagtcatcgctattaccatggtgatgcggttttggcagtacatcaatgggcgtggatagcggtttgactcacggggatttccaagtctccaccccattgacgtcaatgggagtttgttttggcaccaaaatcaacgggactttccaaaatgtcgtaacaactccgccccattgacgcaaatgggcggtaggcgtgtacggtgggaggtctatataagcagagctctctggctaactagagaacccactgcttactggcttatcgaaattaatacgactcactatagggagacccaagctggctagcgtttaaacttaagcttggtaccgagctcggatccgccaccatgggcaaacggacagccgacggaagcgagttcgagtcaccgaaaaagaagcgaaaagttggctccggaatgcagatttgcagacacctgaactacgtgaggtccctgtctcccggcaaggccgtgttctactatcagacccctgagagcgactttgtgccaatccaggtggagaccaatcggatcagagccgccaagtccggcttcacagaggcctatgataagaaccagaatctgaagaacgtggccccccaggacctggcctactccaatcctcagtgcatcgatgcctgttatgtgccccctaacatctccgagatccactgccgcttttctctgcgggtggaggccaatagcctgcagcctgactcctgtgaggatcagaaggtgcggagatacctgatccagctggcctctatctacgcacaagtgggaggctatcaggagctggccaagcggtattgcaagaacatcctgatgggcacctggctgtggcgcaacaatcacaccctgggcacacggatcgacgtgatcacaagctccggcagatgttacgccatcgacgatgccaggtatctggactggatcgattggccagaggaggagcaggtcatgctgaatgacctggccagcgagatggccgccgccctgtgcgagcccaagcagttctggtttgccgatatcaaggccaccctgaagacaggcttctgtcaggagctgcacccttctcagaagtttaccgatagccacgagcagggcgagtctagcaagcagtacgccacagtggagtgcccaaacggcatccaggccgcctgtttccacgcagagaaagtgggagccgccctgcacctgatcgacgattggtgggacgaggtggccgataagaggctgcgcacacacgagtacggagcagaccgcgattatctgatcgccaggcgccaccccatgaagaagcaggacttctactctctgctgaccctgacagccgtgtttatccggcagctgagaaatgtgagggataagggcggcgagatcccaccccaggtgcactatctgatggccgtgctgtgcaaggccggcatgtttcagcggggcaagagctgagcggccgctcgagtctagagggcccgtttaaacccgctgatcagcctcgactgtgccttctagttgccagccatctgttgtttgcccctcccccgtgccttccttgaccctggaaggtgccactcccactgtcctttcctaataaaatgaggaaattgcatcgcattgtctgagtaggtgtcattctattctggggggtggggtggggcaggacagcaagggggaggattgggaagacaatagcaggcatgctggggatgcggtgggctctatggcttctgaggcggaaagaaccagctggggctctagggggtatccccacgcgccctgtagcggcgcattaagcgcggcgggtgtggtggttacgcgcagcgtgaccgctacacttgccagcgccctagcgcccgctcctttcgctttcttcccttcctttctcgccacgttcgccggctttccccgtcaagctctaaatcgggggctccctttagggttccgatttagtgctttacggcacctcgaccccaaaaaacttgattagggtgatggttcacgtagtgggccatcgccctgatagacggtttttcgccctttgacgttggagtccacgttctttaatagtggactcttgttccaaactggaacaacactcaaccctatctcggtctattcttttgatttataagggattttgccgatttcggcctattggttaaaaaatgagctgatttaacaaaaatttaacgcgaattaattctgtggaatgtgtgtcagttagggtgtggaaagtccccaggctccccagcaggcagaagtatgcaaagcatgcatctcaattagtcagcaaccaggtgtggaaagtccccaggctccccagcaggcagaagtatgcaaagcatgcatctcaattagtcagcaaccatagtcccgcccctaactccgcccatcccgcccctaactccgcccagttccgcccattctccgccccatggctgactaattttttttatttatgcagaggccgaggccgcctctgcctctgagctattccagaagtagtgaggaggcttttttggaggcctaggcttttgcaaaaagctcccgggagcttgtatatccattttcggatctgatcaagagacaggatgaggatcgtttcgcatgattgaacaagatggattgcacgcaggttctccggccgcttgggtggagaggctattcggctatgactgggcacaacagacaatcggctgctctgatgccgccgtgttccggctgtcagcgcaggggcgcccggttctttttgtcaagaccgacctgtccggtgccctgaatgaactgcaggacgaggcagcgcggctatcgtggctggccacgacgggcgttccttgcgcagctgtgctcgacgttgtcactgaagcgggaagggactggctgctattgggcgaagtgccggggcaggatctcctgtcatctcaccttgctcctgccgagaaagtatccatcatggctgatgcaatgcggcggctgcatacgcttgatccggctacctgcccattcgaccaccaagcgaaacatcgcatcgagcgagcacgtactcggatggaagccggtcttgtcgatcaggatgatctggacgaagagcatcaggggctcgcgccagccgaactgttcgccaggctcaaggcgcgcatgcccgacggcgaggatctcgtcgtgacccatggcgatgcctgcttgccgaatatcatggtggaaaatggccgcttttctggattcatcgactgtggccggctgggtgtggcggaccgctatcaggacatagcgttggctacccgtgatattgctgaagagcttggcggcgaatgggctgaccgcttcctcgtgctttacggtatcgccgctcccgattcgcagcgcatcgccttctatcgccttcttgacgagttcttctgagcgggactctggggttcgaaatgaccgaccaagcgacgcccaacctgccatcacgagatttcgattccaccgccgccttctatgaaaggttgggcttcggaatcgttttccgggacgccggctggatgatcctccagcgcggggatctcatgctggagttcttcgcccaccccaacttgtttattgcagcttataatggttacaaataaagcaatagcatcacaaatttcacaaataaagcatttttttcactgcattctagttgtggtttgtccaaactcatcaatgtatcttatcatgtctgtataccgtcgacctctagctagagcttggcgtaatcatggtcatagctgtttcctgtgtgaaattgttatccgctcacaattccacacaacatacgagccggaagcataaagtgtaaagcctggggtgcctaatgagtgagctaactcacattaattgcgttgcgctcactgcccgctttccagtcgggaaacctgtcgtgccagctgcattaatgaatcggccaacgcgcggggagaggcggtttgcgtattgggcgctcttccgcttcctcgctcactgactcgctgcgctcggtcgttcggctgcggcgagcggtatcagctcactcaaaggcggtaatacggttatccacagaatcaggggataacgcaggaaagaacatgtgagcaaaaggccagcaaaaggccaggaaccgtaaaaaggccgcgttgctggcgtttttccataggctccgcccccctgacgagcatcacaaaaatcgacgctcaagtcagaggtggcgaaacccgacaggactataaagataccaggcgtttccccctggaagctccctcgtgcgctctcctgttccgaccctgccgcttaccggatacctgtccgcctttctcccttcgggaagcgtggcgctttctcatagctcacgctgtaggtatctcagttcggtgtaggtcgttcgctccaagctgggctgtgtgcacgaaccccccgttcagcccgaccgctgcgccttatccggtaactatcgtcttgagtccaacccggtaagacacgacttatcgccactggcagcagccactggtaacaggattagcagagcgaggtatgtaggcggtgctacagagttcttgaagtggtggcctaactacggctacactagaagaacagtatttggtatctgcgctctgctgaagccagttaccttcggaaaaagagttggtagctcttgatccggcaaacaaaccaccgctggtagcggtttttttgtttgcaagcagcagattacgcgcagaaaaaaaggatctcaagaagatcctttgatcttttctacggggtctgacgctcagtggaacgaaaactcacgttaagggattttggtcatgagattatcaaaaaggatcttcacctagatccttttaaattaaaaatgaagttttaaatcaatctaaagtatatatgagtaaacttggtctgacagttaccaatgcttaatcagtgaggcacctatctcagcgatctgtctatttcgttcatccatagttgcctgactccccgtcgtgtagataactacgatacgggagggcttaccatctggccccagtgctgcaatgataccgcgagacccacgctcaccggctccagatttatcagcaataaaccagccagccggaagggccgagcgcagaagtggtcctgcaactttatccgcctccatccagtctattaattgttgccgggaagctagagtaagtagttcgccagttaatagtttgcgcaacgttgttgccattgctacaggcatcgtggtgtcacgctcgtcgtttggtatggcttcattcagctccggttcccaacgatcaaggcgagttacatgatcccccatgttgtgcaaaaaagcggttagctccttcggtcctccgatcgttgtcagaagtaagttggccgcagtgttatcactcatggttatggcagcactgcataattctcttactgtcatgccatccgtaagatgcttttctgtgactggtgagtactcaaccaagtcattctgagaatagtgtatgcggcgaccgagttgctcttgcccggcgtcaatacgggataataccgcgccacatagcagaactttaaaagtgctcatcattggaaaacgttcttcggggcgaaaactctcaaggatcttaccgctgttgagatccagttcgatgtaacccactcgtgcacccaactgatcttcagcatcttttactttcaccagcgtttctgggtgagcaaaaacaggaaggcaaaatgccgcaaaaaagggaataagggcgacacggaaatgttgaatactcatactcttcctttttcaatattattgaagcatttatcagggttattgtctcatgagcggatacatatttgaatgtatttagaaaaataaacaaataggggttccgcgcacatttccccgaaaagtgccacctgacgtc

SEQ ID NO: 185 - DNA, 6084 bp, Artificial Sequence
  Synthetic
gacggatcgggagatctcccgatcccctatggtgcactctcagtacaatctgctctgatgccgcatagttaagccagtatctgctccctgcttgtgtgttggaggtcgctgagtagtgcgcgagcaaaatttaagctacaacaaggcaaggcttgaccgacaattgcatgaagaatctgcttagggttaggcgttttgcgctgcttcgcgatgtacgggccagatatacgcgttgacattgattattgactagttattaatagtaatcaattacggggtcattagttcatagcccatatatggagttccgcgttacataacttacggtaaatggcccgcctggctgaccgcccaacgacccccgcccattgacgtcaataatgacgtatgttcccatagtaacgccaatagggactttccattgacgtcaatgggtggagtatttacggtaaactgcccacttggcagtacatcaagtgtatcatatgccaagtacgccccctattgacgtcaatgacggtaaatggcccgcctggcattatgcccagtacatgaccttatgggactttcctacttggcagtacatctacgtattagtcatcgctattaccatggtgatgcggttttggcagtacatcaatgggcgtggatagcggtttgactcacggggatttccaagtctccaccccattgacgtcaatgggagtttgttttggcaccaaaatcaacgggactttccaaaatgtcgtaacaactccgccccattgacgcaaatgggcggtaggcgtgtacggtgggaggtctatataagcagagctctctggctaactagagaacccactgcttactggcttatcgaaattaatacgactcactatagggagacccaagctggctagcgtttaaacttaagcttggtaccgagctcggatccgccaccatgggcaaacggacagccgacggaagcgagttcgagtcaccgaaaaagaagcgaaaagttggctccggaatggccaatagattttacttcctgatccgctacatgcctgaggacgtggacgagggcctgctggccggcagatgtatctctatcctgcatggcgtcctgagcagcgatcagaacgacattgacggcggtatcggcgtggtgttccctcagtggagctgcaccagcctgggaagaagcatcgccttcgtgtctgataatcagagacacctggaacagctgtcccagcagcactactttgctgttatgaaaggcgacaacctgtttgacatcagccacatccaggccgtgcctagcggactgagtgaaatcagattcaagcggaaccagggcatcgctaagtgcttcgccggcgagaagagacggagactggccagagccaagcggcgggccgaggccagaggagaagtgttcaacccaaagcacggcatgagcgacagagaagtgtccctgttccacaaggccgtgatgaccagcaagagcaccggccagaagtacctgctccacatccagagggagacagtgaccggatctagcgtgtcccaatacagccaatacggcctggctacaaacatcgagtgcatgggcaccgtgcccgacctgtctcctatcatccccttcttctgagcggccgctcgagtctagagggcccgtttaaacccgctgatcagcctcgactgtgccttctagttgccagccatctgttgtttgcccctcccccgtgccttccttgaccctggaaggtgccactcccactgtcctttcctaataaaatgaggaaattgcatcgcattgtctgagtaggtgtcattctattctggggggtggggtggggcaggacagcaagggggaggattgggaagacaatagcaggcatgctggggatgcggtgggctctatggcttctgaggcggaaagaaccagctggggctctagggggtatccccacgcgccctgtagcggcgcattaagcgcggcgggtgtggtggttacgcgcagcgtgaccgctacacttgccagcgccctagcgcccgctcctttcgctttcttcccttcctttctcgccacgttcgccggctttccccgtcaagctctaaatcgggggctccctttagggttccgatttagtgctttacggcacctcgaccccaaaaaacttgattagggtgatggttcacgtagtgggccatcgccctgatagacggtttttcgccctttgacgttggagtccacgttctttaatagtggactcttgttccaaactggaacaacactcaaccctatctcggtctattcttttgatttataagggattttgccgatttcggcctattggttaaaaaatgagctgatttaacaaaaatttaacgcgaattaattctgtggaatgtgtgtcagttagggtgtggaaagtccccaggctccccagcaggcagaagtatgcaaagcatgcatctcaattagtcagcaaccaggtgtggaaagtccccaggctccccagcaggcagaagtatgcaaagcatgcatctcaattagtcagcaaccatagtcccgcccctaactccgcccatcccgcccctaactccgcccagttccgcccattctccgccccatggctgactaattttttttatttatgcagaggccgaggccgcctctgcctctgagctattccagaagtagtgaggaggcttttttggaggcctaggcttttgcaaaaagctcccgggagcttgtatatccattttcggatctgatcaagagacaggatgaggatcgtttcgcatgattgaacaagatggattgcacgcaggttctccggccgcttgggtggagaggctattcggctatgactgggcacaacagacaatcggctgctctgatgccgccgtgttccggctgtcagcgcaggggcgcccggttctttttgtcaagaccgacctgtccggtgccctgaatgaactgcaggacgaggcagcgcggctatcgtggctggccacgacgggcgttccttgcgcagctgtgctcgacgttgtcactgaagcgggaagggactggctgctattgggcgaagtgccggggcaggatctcctgtcatctcaccttgctcctgccgagaaagtatccatcatggctgatgcaatgcggcggctgcatacgcttgatccggctacctgcccattcgaccaccaagcgaaacatcgcatcgagcgagcacgtactcggatggaagccggtcttgtcgatcaggatgatctggacgaagagcatcaggggctcgcgccagccgaactgttcgccaggctcaaggcgcgcatgcccgacggcgaggatctcgtcgtgacccatggcgatgcctgcttgccgaatatcatggtggaaaatggccgcttttctggattcatcgactgtggccggctgggtgtggcggaccgctatcaggacatagcgttggctacccgtgatattgctgaagagcttggcggcgaatgggctgaccgcttcctcgtgctttacggtatcgccgctcccgattcgcagcgcatcgccttctatcgccttcttgacgagttcttctgagcgggactctggggttcgaaatgaccgaccaagcgacgcccaacctgccatcacgagatttcgattccaccgccgccttctatgaaaggttgggcttcggaatcgttttccgggacgccggctggatgatcctccagcgcggggatctcatgctggagttcttcgcccaccccaacttgtttattgcagcttataatggttacaaataaagcaatagcatcacaaatttcacaaataaagcatttttttcactgcattctagttgtggtttgtccaaactcatcaatgtatcttatcatgtctgtataccgtcgacctctagctagagcttggcgtaatcatggtcatagctgtttcctgtgtgaaattgttatccgctcacaattccacacaacatacgagccggaagcataaagtgtaaagcctggggtgcctaatgagtgagctaactcacattaattgcgttgcgctcactgcccgctttccagtcgggaaacctgtcgtgccagctgcattaatgaatcggccaacgcgcggggagaggcggtttgcgtattgggcgctcttccgcttcctcgctcactgactcgctgcgctcggtcgttcggctgcggcgagcggtatcagctcactcaaaggcggtaatacggttatccacagaatcaggggataacgcaggaaagaacatgtgagcaaaaggccagcaaaaggccaggaaccgtaaaaaggccgcgttgctggcgtttttccataggctccgcccccctgacgagcatcacaaaaatcgacgctcaagtcagaggtggcgaaacccgacaggactataaagataccaggcgtttccccctggaagctccctcgtgcgctctcctgttccgaccctgccgcttaccggatacctgtccgcctttctcccttcgggaagcgtggcgctttctcatagctcacgctgtaggtatctcagttcggtgtaggtcgttcgctccaagctgggctgtgtgcacgaaccccccgttcagcccgaccgctgcgccttatccggtaactatcgtcttgagtccaacccggtaagacacgacttatcgccactggcagcagccactggtaacaggattagcagagcgaggtatgtaggcggtgctacagagttcttgaagtggtggcctaactacggctacactagaagaacagtatttggtatctgcgctctgctgaagccagttaccttcggaaaaagagttggtagctcttgatccggcaaacaaaccaccgctggtagcggtttttttgtttgcaagcagcagattacgcgcagaaaaaaaggatctcaagaagatcctttgatcttttctacggggtctgacgctcagtggaacgaaaactcacgttaagggattttggtcatgagattatcaaaaaggatcttcacctagatccttttaaattaaaaatgaagttttaaatcaatctaaagtatatatgagtaaacttggtctgacagttaccaatgcttaatcagtgaggcacctatctcagcgatctgtctatttcgttcatccatagttgcctgactccccgtcgtgtagataactacgatacgggagggcttaccatctggccccagtgctgcaatgataccgcgagacccacgctcaccggctccagatttatcagcaataaaccagccagccggaagggccgagcgcagaagtggtcctgcaactttatccgcctccatccagtctattaattgttgccgggaagctagagtaagtagttcgccagttaatagtttgcgcaacgttgttgccattgctacaggcatcgtggtgtcacgctcgtcgtttggtatggcttcattcagctccggttcccaacgatcaaggcgagttacatgatcccccatgttgtgcaaaaaagcggttagctccttcggtcctccgatcgttgtcagaagtaagttggccgcagtgttatcactcatggttatggcagcactgcataattctcttactgtcatgccatccgtaagatgcttttctgtgactggtgagtactcaaccaagtcattctgagaatagtgtatgcggcgaccgagttgctcttgcccggcgtcaatacgggataataccgcgccacatagcagaactttaaaagtgctcatcattggaaaacgttcttcggggcgaaaactctcaaggatcttaccgctgttgagatccagttcgatgtaacccactcgtgcacccaactgatcttcagcatcttttactttcaccagcgtttctgggtgagcaaaaacaggaaggcaaaatgccgcaaaaaagggaataagggcgacacggaaatgttgaatactcatactcttcctttttcaatattattgaagcatttatcagggttattgtctcatgagcggatacatatttgaatgtatttagaaaaataaacaaataggggttccgcgcacatttccccgaaaagtgccacctgacgtc

SEQ ID NO: 186 - DNA, 6477 bp, Artificial Sequence
  Synthetic
gacggatcgggagatctcccgatcccctatggtgcactctcagtacaatctgctctgatgccgcatagttaagccagtatctgctccctgcttgtgtgttggaggtcgctgagtagtgcgcgagcaaaatttaagctacaacaaggcaaggcttgaccgacaattgcatgaagaatctgcttagggttaggcgttttgcgctgcttcgcgatgtacgggccagatatacgcgttgacattgattattgactagttattaatagtaatcaattacggggtcattagttcatagcccatatatggagttccgcgttacataacttacggtaaatggcccgcctggctgaccgcccaacgacccccgcccattgacgtcaataatgacgtatgttcccatagtaacgccaatagggactttccattgacgtcaatgggtggagtatttacggtaaactgcccacttggcagtacatcaagtgtatcatatgccaagtacgccccctattgacgtcaatgacggtaaatggcccgcctggcattatgcccagtacatgaccttatgggactttcctacttggcagtacatctacgtattagtcatcgctattaccatggtgatgcggttttggcagtacatcaatgggcgtggatagcggtttgactcacggggatttccaagtctccaccccattgacgtcaatgggagtttgttttggcaccaaaatcaacgggactttccaaaatgtcgtaacaactccgccccattgacgcaaatgggcggtaggcgtgtacggtgggaggtctatataagcagagctctctggctaactagagaacccactgcttactggcttatcgaaattaatacgactcactatagggagacccaagctggctagcgtttaaacttaagcttggtaccgagctcggatccgccaccatgggcaaacggacagccgacggaagcgagttcgagtcaccgaaaaagaagcgaaaagttggctccggaatggactctctgagccccgaggatgaggccaagtaccaggccttcgtggacatctttgtggagcagcctatcgccaccatggtcatggccgacttcgataggctgcgctataacaggcagtttggcggcgaccagcagtgcatgctgctgaccggcgatacaggcagcggcaagtccttcctgatcaaggagtactgtcggagactggcccagacaaatcctatgaagcaggccctggtgctgagcagcagaatcccctccaagcccaccctggagtctacaatcatcgagctgctgaaggacttcggccactttggcgccacctatcgcaagggcaagtccaaggatcagtctctgacagtgagcctgatcaagtgcctgaaggcctcctgcgtggagctgatcatcatcaacgagttccaggagctggtggagtttaagaccggcagggccctgaatgagatcgccacacgcctgaagcacatcagcgaggaggcaaccgtgcccatcgtgctggtgggcatgccttgggccgccaagatcgcaaacgagccacagtgggccagccggctgctgatcaggcgcgagctgccatactttaagctgagcgaggagcccgagcacttcatccggtttatcaagggcctggccgccagaatgcctttcaccgagctgccaaagctggacaataagcagacaatcctggccctgttttccgcctctaacggccagacacggagactgaagcagctgctgaatgaggccgtgaagctggccctggtgcagaacgccgtgaccctgacaaatgagcacctggccgacgtgttcagaatgatctttccagccatccccaaccctttcctggcctccatcgagcagatcgagggccaggaggtgtctctgcccagccactacgactctggcgccgataatgagtttgaggccatcatccctacccagtatacagatagactgccactgagccagctgctgcggaagtccagaaagaccaagtgagcggccgctcgagtctagagggcccgtttaaacccgctgatcagcctcgactgtgccttctagttgccagccatctgttgtttgcccctcccccgtgccttccttgaccctggaaggtgccactcccactgtcctttcctaataaaatgaggaaattgcatcgcattgtctgagtaggtgtcattctattctggggggtggggtggggcaggacagcaagggggaggattgggaagacaatagcaggcatgctggggatgcggtgggctctatggcttctgaggcggaaagaaccagctggggctctagggggtatccccacgcgccctgtagcggcgcattaagcgcggcgggtgtggtggttacgcgcagcgtgaccgctacacttgccagcgccctagcgcccgctcctttcgctttcttcccttcctttctcgccacgttcgccggctttccccgtcaagctctaaatcgggggctccctttagggttccgatttagtgctttacggcacctcgaccccaaaaaacttgattagggtgatggttcacgtagtgggccatcgccctgatagacggtttttcgccctttgacgttggagtccacgttctttaatagtggactcttgttccaaactggaacaacactcaaccctatctcggtctattcttttgatttataagggattttgccgatttcggcctattggttaaaaaatgagctgatttaacaaaaatttaacgcgaattaattctgtggaatgtgtgtcagttagggtgtggaaagtccccaggctccccagcaggcagaagtatgcaaagcatgcatctcaattagtcagcaaccaggtgtggaaagtccccaggctccccagcaggcagaagtatgcaaagcatgcatctcaattagtcagcaaccatagtcccgcccctaactccgcccatcccgcccctaactccgcccagttccgcccattctccgccccatggctgactaattttttttatttatgcagaggccgaggccgcctctgcctctgagctattccagaagtagtgaggaggcttttttggaggcctaggcttttgcaaaaagctcccgggagcttgtatatccattttcggatctgatcaagagacaggatgaggatcgtttcgcatgattgaacaagatggattgcacgcaggttctccggccgcttgggtggagaggctattcggctatgactgggcacaacagacaatcggctgctctgatgccgccgtgttccggctgtcagcgcaggggcgcccggttctttttgtcaagaccgacctgtccggtgccctgaatgaactgcaggacgaggcagcgcggctatcgtggctggccacgacgggcgttccttgcgcagctgtgctcgacgttgtcactgaagcgggaagggactggctgctattgggcgaagtgccggggcaggatctcctgtcatctcaccttgctcctgccgagaaagtatccatcatggctgatgcaatgcggcggctgcatacgcttgatccggctacctgcccattcgaccaccaagcgaaacatcgcatcgagcgagcacgtactcggatggaagccggtcttgtcgatcaggatgatctggacgaagagcatcaggggctcgcgccagccgaactgttcgccaggctcaaggcgcgcatgcccgacggcgaggatctcgtcgtgacccatggcgatgcctgcttgccgaatatcatggtggaaaatggccgcttttctggattcatcgactgtggccggctgggtgtggcggaccgctatcaggacatagcgttggctacccgtgatattgctgaagagcttggcggcgaatgggctgaccgcttcctcgtgctttacggtatcgccgctcccgattcgcagcgcatcgccttctatcgccttcttgacgagttcttctgagcgggactctggggttcgaaatgaccgaccaagcgacgcccaacctgccatcacgagatttcgattccaccgccgccttctatgaaaggttgggcttcggaatcgttttccgggacgccggctggatgatcctccagcgcggggatctcatgctggagttcttcgcccaccccaacttgtttattgcagcttataatggttacaaataaagcaatagcatcacaaatttcacaaataaagcatttttttcactgcattctagttgtggtttgtccaaactcatcaatgtatcttatcatgtctgtataccgtcgacctctagctagagcttggcgtaatcatggtcatagctgtttcctgtgtgaaattgttatccgctcacaattccacacaacatacgagccggaagcataaagtgtaaagcctggggtgcctaatgagtgagctaactcacattaattgcgttgcgctcactgcccgctttccagtcgggaaacctgtcgtgccagctgcattaatgaatcggccaacgcgcggggagaggcggtttgcgtattgggcgctcttccgcttcctcgctcactgactcgctgcgctcggtcgttcggctgcggcgagcggtatcagctcactcaaaggcggtaatacggttatccacagaatcaggggataacgcaggaaagaacatgtgagcaaaaggccagcaaaaggccaggaaccgtaaaaaggccgcgttgctggcgtttttccataggctccgcccccctgacgagcatcacaaaaatcgacgctcaagtcagaggtggcgaaacccgacaggactataaagataccaggcgtttccccctggaagctccctcgtgcgctctcctgttccgaccctgccgcttaccggatacctgtccgcctttctcccttcgggaagcgtggcgctttctcatagctcacgctgtaggtatctcagttcggtgtaggtcgttcgctccaagctgggctgtgtgcacgaaccccccgttcagcccgaccgctgcgccttatccggtaactatcgtcttgagtccaacccggtaagacacgacttatcgccactggcagcagccactggtaacaggattagcagagcgaggtatgtaggcggtgctacagagttcttgaagtggtggcctaactacggctacactagaagaacagtatttggtatctgcgctctgctgaagccagttaccttcggaaaaagagttggtagctcttgatccggcaaacaaaccaccgctggtagcggtttttttgtttgcaagcagcagattacgcgcagaaaaaaaggatctcaagaagatcctttgatcttttctacggggtctgacgctcagtggaacgaaaactcacgttaagggattttggtcatgagattatcaaaaaggatcttcacctagatccttttaaattaaaaatgaagttttaaatcaatctaaagtatatatgagtaaacttggtctgacagttaccaatgcttaatcagtgaggcacctatctcagcgatctgtctatttcgttcatccatagttgcctgactccccgtcgtgtagataactacgatacgggagggcttaccatctggccccagtgctgcaatgataccgcgagacccacgctcaccggctccagatttatcagcaataaaccagccagccggaagggccgagcgcagaagtggtcctgcaactttatccgcctccatccagtctattaattgttgccgggaagctagagtaagtagttcgccagttaatagtttgcgcaacgttgttgccattgctacaggcatcgtggtgtcacgctcgtcgtttggtatggcttcattcagctccggttcccaacgatcaaggcgagttacatgatcccccatgttgtgcaaaaaagcggttagctccttcggtcctccgatcgttgtcagaagtaagttggccgcagtgttatcactcatggttatggcagcactgcataattctcttactgtcatgccatccgtaagatgcttttctgtgactggtgagtactcaaccaagtcattctgagaatagtgtatgcggcgaccgagttgctcttgcccggcgtcaatacgggataataccgcgccacatagcagaactttaaaagtgctcatcattggaaaacgttcttcggggcgaaaactctcaaggatcttaccgctgttgagatccagttcgatgtaacccactcgtgcacccaactgatcttcagcatcttttactttcaccagcgtttctgggtgagcaaaaacaggaaggcaaaatgccgcaaaaaagggaataagggcgacacggaaatgttgaatactcatactcttcctttttcaatattattgaagcatttatcagggttattgtctcatgagcggatacatatttgaatgtatttagaaaaataaacaaataggggttccgcgcacatttccccgaaaagtgccacctgacgtc

SEQ ID NO: 187 - DNA, 4798 bp, Artificial Sequence
  Synthetic
ttgcccggcgtcaatacgggataataccgcgccacatagcagaactttaaaagtgctcatcattggaaaacgttcttcggggcgaaaactctcaaggatcttaccgctgttgagatccagttcgatgtaacccactcgtgcacccaactgatcttcagcatcttttactttcaccagcgtttctgggtgagcaaaaacaggaaggcaaaatgccgcaaaaaagggaataagggcgacacggaaatgttgaatactcatactcttcctttttcattattattgaagcatttatcagggttattgtctcatgagcggatacatatttgaatgtatttagaaaaataaacaaataggggttccgcgcacatttccccgaaaagtgccacctgacgtcgacggatcgggagatctcccgatcccctatggtcgactctcagtacaatctgctctgatgccgcatagttaagccagtatctgctccctgcttgtgtgttggaggtcgctgagtagtgcgcgagcaaaatttaagctacaacaaggcaaggcttgaccgacaattgcatgaagaatctgcttagggttaggcgttttgcgctgcttcgcgatgtacgggccagatatacgcgagggcctatttcccatgattccttcatatttgcatatacgatacaaggctgttagagagataattagaattaatttgactgtaaacacaaagatattagtacaaaatacgtgacgtagaaagtaataatttcttgggtagtttgcagttttaaaattatgttttaaaatggactatcatatgcttaccgtaacttgaaagtatttcgatttcttggctttatatatcttgtggaaaggacgaaacaccgtaatacgactcactatagggtctagaattcctgtgacctgccggataggcagttgagatagcgaggtattcggctccgcgacggaggctaagaagacctgccgtggaggcagccaatgatgtagcggccgctttttttcttctgaggcggaaagaaccagctggggctctagggggtatccccacgcgccctgtagcggcgcattaagcgcggcgggtgtggtggttacgcgcagcgtgaccgctacacttgccagcgccctagcgcccgctcctttcgctttcttcccttcctttctcgccacgttcgccggctttccccgtcaagctctaaatcgggggctccctttagggttccgatttagtgctttacggcacctcgaccccaaaaaacttgattagggtgatggttcacgtagtgggccatcgccctgatagacggtttttcgccctttgacgttggagtccacgttctttaatagtggactcttgttccaaactggaacaacactcaaccctatctcggtctattcttttgatttataagggattttgccgatttcggcctattggttaaaaaatgagctgatttaacaaaaatttaacgcgaattaattctgtggaatgtgtgtcagttagggtgtggaaagtccccaggctccccagcaggcagaagtatgcaaagcatgcatctcaattagtcagcaaccaggtgtggaaagtccccaggctccccagcaggcagaagtatgcaaagcatgcatctcaattagtcagcaaccatagtcccgcccctaactccgcccatcccgcccctaactccgcccagttccgcccattctccgccccatggctgactaattttttttatttatgcagaggccgaggccgcctctgcctctgagctattccagaagtagtgaggaggcttttttggaggcctaggcttttgcaaaaagctcccgggagcttgtatatccattttcggatctgatcaagagacaggatgaggatcgtttcgcatgattgaacaagatggattgcacgcaggttctccggccgcttgggtggagaggctattcggctatgactgggcacaacagacaatcggctgctctgatgccgccgtgttccggctgtcagcgcaggggcgcccggttctttttgtcaagaccgacctgtccggtgccctgaatgaactgcaggacgaggcagcgcggctatcgtggctggccacgacgggcgttccttgcgcagctgtgctcgacgttgtcactgaagcgggaagggactggctgctattgggcgaagtgccggggcaggatctcctgtcatctcaccttgctcctgccgagaaagtatccatcatggctgatgcaatgcggcggctgcatacgcttgatccggctacctgcccattcgaccaccaagcgaaacatcgcatcgagcgagcacgtactcggatggaagccggtcttgtcgatcaggatgatctggacgaagagcatcaggggctcgcgccagccgaactgttcgccaggctcaaggcgcgcatgcccgacggcgaggatctcgtcgtgacccatggcgatgcctgcttgccgaatatcatggtggaaaatggccgcttttctggattcatcgactgtggccggctgggtgtggcggaccgctatcaggacatagcgttggctacccgtgatattgctgaagagcttggcggcgaatgggctgaccgcttcctcgtgctttacggtatcgccgctcccgattcgcagcgcatcgccttctatcgccttcttgacgagttcttctgagcgggactctggggttcgaaatgaccgaccaagcgacgcccaacctgccatcacgagatttcgattccaccgccgccttctatgaaaggttgggcttcggaatcgttttccgggacgccggctggatgatcctccagcgcggggatctcatgctggagttcttcgcccaccccaacttgtttattgcagcttataatggttacaaataaagcaatagcatcacaaatttcacaaataaagcatttttttcactgcattctagttgtggtttgtccaaactcatcaatgtatcttatcatgtctgtataccgtcgacctctagctagagcttggcgtaatcatggtcatagctgtttcctgtgtgaaattgttatccgctcacaattccacacaacatacgagccggaagcataaagtgtaaagcctggggtgcctaatgagtgagctaactcacattaattgcgttgcgctcactgcccgctttccagtcgggaaacctgtcgtgccagctgcattaatgaatcggccaacgcgcggggagaggcggtttgcgtattgggcgctcttccgcttcctcgctcactgactcgctgcgctcggtcgttcggctgcggcgagcggtatcagctcactcaaaggcggtaatacggttatccacagaatcaggggataacgcaggaaagaacatgtgagcaaaaggccagcaaaaggccaggaaccgtaaaaaggccgcgttgctggcgtttttccataggctccgcccccctgacgagcatcacaaaaatcgacgctcaagtcagaggtggcgaaacccgacaggactataaagataccaggcgtttccccctggaagctccctcgtgcgctctcctgttccgaccctgccgcttaccggatacctgtccgcctttctcccttcgggaagcgtggcgctttctcaatgctcacgctgtaggtatctcagttcggtgtaggtcgttcgctccaagctgggctgtgtgcacgaaccccccgttcagcccgaccgctgcgccttatccggtaactatcgtcttgagtccaacccggtaagacacgacttatcgccactggcagcagccactggtaacaggattagcagagcgaggtatgtaggcggtgctacagagttcttgaagtggtggcctaactacggctacactagaaggacagtatttggtatctgcgctctgctgaagccagttaccttcggaaaaagagttggtagctcttgatccggcaaacaaaccaccgctggtagcggtggtttttttgtttgcaagcagcagattacgcgcagaaaaaaaggatctcaagaagatcctttgatcttttctacggggtctgacgctcagtggaacgaaaactcacgttaagggattttggtcatgagattatcaaaaaggatcttcacctagatccttttaaattaaaaatgaagttttaaatcaatctaaagtatatatgagtaaacttggtctgacagttaccaatgcttaatcagtgaggcacctatctcagcgatctgtctatttcgttcatccatagttgcctgactccccgtcgtgtagataactacgatacgggagggcttaccatctggccccagtgctgcaatgataccgcgagacccacgctcaccggctccagatttatcagcaataaaccagccagccggaagggccgagcgcagaagtggtcctgcaactttatccgcctccatccagtctattaattgttgccgggaagctagagtaagtagttcgccagttaatagtttgcgcaacgttgttgccattgctacaggcatcgtggtgtcacgctcgtcgtttggtatggcttcattcagctccggttcccaacgatcaaggcgagttacatgatcccccatgttgtgcaaaaaagcggttagctccttcggtcctccgatcgttgtcagaagtaagttggccgcagtgttatcactcatggttatggcagcactgcataattctcttactgtcatgccatccgtaagatgcttttctgtgactggtgagtactcaaccaagtcattctgagaatagtgtatgcggcgaccgagttgctc

SEQ ID NO: 188 - DNA, 4798 bp, Artificial Sequence
  Synthetic
ttgcccggcgtcaatacgggataataccgcgccacatagcagaactttaaaagtgctcatcattggaaaacgttcttcggggcgaaaactctcaaggatcttaccgctgttgagatccagttcgatgtaacccactcgtgcacccaactgatcttcagcatcttttactttcaccagcgtttctgggtgagcaaaaacaggaaggcaaaatgccgcaaaaaagggaataagggcgacacggaaatgttgaatactcatactcttcctttttcattattattgaagcatttatcagggttattgtctcatgagcggatacatatttgaatgtatttagaaaaataaacaaataggggttccgcgcacatttccccgaaaagtgccacctgacgtcgacggatcgggagatctcccgatcccctatggtcgactctcagtacaatctgctctgatgccgcatagttaagccagtatctgctccctgcttgtgtgttggaggtcgctgagtagtgcgcgagcaaaatttaagctacaacaaggcaaggcttgaccgacaattgcatgaagaatctgcttagggttaggcgttttgcgctgcttcgcgatgtacgggccagatatacgcgagggcctatttcccatgattccttcatatttgcatatacgatacaaggctgttagagagataattagaattaatttgactgtaaacacaaagatattagtacaaaatacgtgacgtagaaagtaataatttcttgggtagtttgcagttttaaaattatgttttaaaatggactatcatatgcttaccgtaacttgaaagtatttcgatttcttggctttatatatcttgtggaaaggacgaaacaccgtaatacgactcactatagggtctagaattcctgtgacctgccggataggcagttgagataaatgcaggcaaatcaaccttagtctgaaggccaagacctgccgtggaggcagccaatgatgtagcggccgctttttttcttctgaggcggaaagaaccagctggggctctagggggtatccccacgcgccctgtagcggcgcattaagcgcggcgggtgtggtggttacgcgcagcgtgaccgctacacttgccagcgccctagcgcccgctcctttcgctttcttcccttcctttctcgccacgttcgccggctttccccgtcaagctctaaatcgggggctccctttagggttccgatttagtgctttacggcacctcgaccccaaaaaacttgattagggtgatggttcacgtagtgggccatcgccctgatagacggtttttcgccctttgacgttggagtccacgttctttaatagtggactcttgttccaaactggaacaacactcaaccctatctcggtctattcttttgatttataagggattttgccgatttcggcctattggttaaaaaatgagctgatttaacaaaaatttaacgcgaattaattctgtggaatgtgtgtcagttagggtgtggaaagtccccaggctccccagcaggcagaagtatgcaaagcatgcatctcaattagtcagcaaccaggtgtggaaagtccccaggctccccagcaggcagaagtatgcaaagcatgcatctcaattagtcagcaaccatagtcccgcccctaactccgcccatcccgcccctaactccgcccagttccgcccattctccgccccatggctgactaattttttttatttatgcagaggccgaggccgcctctgcctctgagctattccagaagtagtgaggaggcttttttggaggcctaggcttttgcaaaaagctcccgggagcttgtatatccattttcggatctgatcaagagacaggatgaggatcgtttcgcatgattgaacaagatggattgcacgcaggttctccggccgcttgggtggagaggctattcggctatgactgggcacaacagacaatcggctgctctgatgccgccgtgttccggctgtcagcgcaggggcgcccggttctttttgtcaagaccgacctgtccggtgccctgaatgaactgcaggacgaggcagcgcggctatcgtggctggccacgacgggcgttccttgcgcagctgtgctcgacgttgtcactgaagcgggaagggactggctgctattgggcgaagtgccggggcaggatctcctgtcatctcaccttgctcctgccgagaaagtatccatcatggctgatgcaatgcggcggctgcatacgcttgatccggctacctgcccattcgaccaccaagcgaaacatcgcatcgagcgagcacgtactcggatggaagccggtcttgtcgatcaggatgatctggacgaagagcatcaggggctcgcgccagccgaactgttcgccaggctcaaggcgcgcatgcccgacggcgaggatctcgtcgtgacccatggcgatgcctgcttgccgaatatcatggtggaaaatggccgcttttctggattcatcgactgtggccggctgggtgtggcggaccgctatcaggacatagcgttggctacccgtgatattgctgaagagcttggcggcgaatgggctgaccgcttcctcgtgctttacggtatcgccgctcccgattcgcagcgcatcgccttctatcgccttcttgacgagttcttctgagcgggactctggggttcgaaatgaccgaccaagcgacgcccaacctgccatcacgagatttcgattccaccgccgccttctatgaaaggttgggcttcggaatcgttttccgggacgccggctggatgatcctccagcgcggggatctcatgctggagttcttcgcccaccccaacttgtttattgcagcttataatggttacaaataaagcaatagcatcacaaatttcacaaataaagcatttttttcactgcattctagttgtggtttgtccaaactcatcaatgtatcttatcatgtctgtataccgtcgacctctagctagagcttggcgtaatcatggtcatagctgtttcctgtgtgaaattgttatccgctcacaattccacacaacatacgagccggaagcataaagtgtaaagcctggggtgcctaatgagtgagctaactcacattaattgcgttgcgctcactgcccgctttccagtcgggaaacctgtcgtgccagctgcattaatgaatcggccaacgcgcggggagaggcggtttgcgtattgggcgctcttccgcttcctcgctcactgactcgctgcgctcggtcgttcggctgcggcgagcggtatcagctcactcaaaggcggtaatacggttatccacagaatcaggggataacgcaggaaagaacatgtgagcaaaaggccagcaaaaggccaggaaccgtaaaaaggccgcgttgctggcgtttttccataggctccgcccccctgacgagcatcacaaaaatcgacgctcaagtcagaggtggcgaaacccgacaggactataaagataccaggcgtttccccctggaagctccctcgtgcgctctcctgttccgaccctgccgcttaccggatacctgtccgcctttctcccttcgggaagcgtggcgctttctcaatgctcacgctgtaggtatctcagttcggtgtaggtcgttcgctccaagctgggctgtgtgcacgaaccccccgttcagcccgaccgctgcgccttatccggtaactatcgtcttgagtccaacccggtaagacacgacttatcgccactggcagcagccactggtaacaggattagcagagcgaggtatgtaggcggtgctacagagttcttgaagtggtggcctaactacggctacactagaaggacagtatttggtatctgcgctctgctgaagccagttaccttcggaaaaagagttggtagctcttgatccggcaaacaaaccaccgctggtagcggtggtttttttgtttgcaagcagcagattacgcgcagaaaaaaaggatctcaagaagatcctttgatcttttctacggggtctgacgctcagtggaacgaaaactcacgttaagggattttggtcatgagattatcaaaaaggatcttcacctagatccttttaaattaaaaatgaagttttaaatcaatctaaagtatatatgagtaaacttggtctgacagttaccaatgcttaatcagtgaggcacctatctcagcgatctgtctatttcgttcatccatagttgcctgactccccgtcgtgtagataactacgatacgggagggcttaccatctggccccagtgctgcaatgataccgcgagacccacgctcaccggctccagatttatcagcaataaaccagccagccggaagggccgagcgcagaagtggtcctgcaactttatccgcctccatccagtctattaattgttgccgggaagctagagtaagtagttcgccagttaatagtttgcgcaacgttgttgccattgctacaggcatcgtggtgtcacgctcgtcgtttggtatggcttcattcagctccggttcccaacgatcaaggcgagttacatgatcccccatgttgtgcaaaaaagcggttagctccttcggtcctccgatcgttgtcagaagtaagttggccgcagtgttatcactcatggttatggcagcactgcataattctcttactgtcatgccatccgtaagatgcttttctgtgactggtgagtactcaaccaagtcattctgagaatagtgtatgcggcgaccgagttgctc

SEQ ID NO: 189 - DNA, 6673 bp, Artificial Sequence
  Synthetic
gacggatcgggagatctcccgatcccctatggtgcactctcagtacaatctgctctgatgccgcatagttaagccagtatctgctccctgcttgtgtgttggaggtcgctgagtagtgcgcgagcaaaatttaagctacaacaaggcaaggcttgaccgacaattgcatgaagaatctgcttagggttaggcgttttgcgctgcttcgcgatgtacgggccagatatacgcgttgacattgattattgactagttattaatagtaatcaattacggggtcattagttcatagcccatatatggagttccgcgttacataacttacggtaaatggcccgcctggctgaccgcccaacgacccccgcccattgacgtcaataatgacgtatgttcccatagtaacgccaatagggactttccattgacgtcaatgggtggagtatttacggtaaactgcccacttggcagtacatcaagtgtatcatatgccaagtacgccccctattgacgtcaatgacggtaaatggcccgcctggcattatgcccagtacatgaccttatgggactttcctacttggcagtacatctacgtattagtcatcgctattaccatggtgatgcggttttggcagtacatcaatgggcgtggatagcggtttgactcacggggatttccaagtctccaccccattgacgtcaatgggagtttgttttggcaccaaaatcaacgggactttccaaaatgtcgtaacaactccgccccattgacgcaaatgggcggtaggcgtgtacggtgggaggtctatataagcagagctctctggctaactagagaacccactgcttactggcttatcgaaattaatacgactcactatagggagacccaagctggctagcgtttaaacttaagcttggtaccgagctcggccaccatggactctctgagccccgaggatgaggccaagtaccaggccttcgtggacatctttgtggagcagcctatcgccaccatggtcatggccgacttcgataggctgcgctataacaggcagtttggcggcgaccagcagtgcatgctgctgaccggcgatacaggcagcggcaagtccttcctgatcaaggagtactgtcggagactggcccagacaaatcctatgaagcaggccctggtgctgagcagcagaatcccctccaagcccaccctggagtctacaatcatcgagctgctgaaggacttcggccactttggcgccacctatcgcaagggcaagtccaaggatcagtctctgacagtgagcctgatcaagtgcctgaaggcctcctgcgtggagctgatcatcatcaacgagttccaggagctggtggagtttaagaccggcagggccctgaatgagatcgccacacgcctgaagcacatcagcgaggaggcaaccgtgcccatcgtgctggtgggcatgccttgggccgccaagatcgcaaacgagccacagtgggccagccggctgctgatcaggcgcgagctgccatactttaagctgagcgaggagcccgagcacttcatccggtttatcaagggcctggccgccagaatgcctttcaccgagctgccaaagctggacaataagcagacaatcctggccctgttttccgcctctaacggccagacacggagactgaagcagctgctgaatgaggccgtgaagctggccctggtgcagaacgccgtgaccctgacaaatgagcacctggccgacgtgttcagaatgatctttccagccatccccaaccctttcctggcctccatcgagcagatcgagggccaggaggtgtctctgcccagccactacgactctggcgccgataatgagtttgaggccatcatccctacccagtatacagatagactgccactgagccagctgctgcggaagtccagaaagaccaagggctccggaaaacggacagccgacggaagcgagttcgagtcaccgaaaaagaagcgaaaagttggtggtagtggtggaagcggcgaggccagcggttccggacgggctgacgcattggacgattttgatctggatatgctgggaagtgacgccctcgatgattttgaccttgacatgcttggttcggatgcccttgatgactttgacctcgacatgctcggcagtgacgcccttgatgatttcgacctggacatgctgattaactctagatgagcggccgctcgagtctagagggcccgtttaaacccgctgatcagcctcgactgtgccttctagttgccagccatctgttgtttgcccctcccccgtgccttccttgaccctggaaggtgccactcccactgtcctttcctaataaaatgaggaaattgcatcgcattgtctgagtaggtgtcattctattctggggggtggggtggggcaggacagcaagggggaggattgggaagacaatagcaggcatgctggggatgcggtgggctctatggcttctgaggcggaaagaaccagctggggctctagggggtatccccacgcgccctgtagcggcgcattaagcgcggcgggtgtggtggttacgcgcagcgtgaccgctacacttgccagcgccctagcgcccgctcctttcgctttcttcccttcctttctcgccacgttcgccggctttccccgtcaagctctaaatcgggggctccctttagggttccgatttagtgctttacggcacctcgaccccaaaaaacttgattagggtgatggttcacgtagtgggccatcgccctgatagacggtttttcgccctttgacgttggagtccacgttctttaatagtggactcttgttccaaactggaacaacactcaaccctatctcggtctattcttttgatttataagggattttgccgatttcggcctattggttaaaaaatgagctgatttaacaaaaatttaacgcgaattaattctgtggaatgtgtgtcagttagggtgtggaaagtccccaggctccccagcaggcagaagtatgcaaagcatgcatctcaattagtcagcaaccaggtgtggaaagtccccaggctccccagcaggcagaagtatgcaaagcatgcatctcaattagtcagcaaccatagtcccgcccctaactccgcccatcccgcccctaactccgcccagttccgcccattctccgccccatggctgactaattttttttatttatgcagaggccgaggccgcctctgcctctgagctattccagaagtagtgaggaggcttttttggaggcctaggcttttgcaaaaagctcccgggagcttgtatatccattttcggatctgatcaagagacaggatgaggatcgtttcgcatgattgaacaagatggattgcacgcaggttctccggccgcttgggtggagaggctattcggctatgactgggcacaacagacaatcggctgctctgatgccgccgtgttccggctgtcagcgcaggggcgcccggttctttttgtcaagaccgacctgtccggtgccctgaatgaactgcaggacgaggcagcgcggctatcgtggctggccacgacgggcgttccttgcgcagctgtgctcgacgttgtcactgaagcgggaagggactggctgctattgggcgaagtgccggggcaggatctcctgtcatctcaccttgctcctgccgagaaagtatccatcatggctgatgcaatgcggcggctgcatacgcttgatccggctacctgcccattcgaccaccaagcgaaacatcgcatcgagcgagcacgtactcggatggaagccggtcttgtcgatcaggatgatctggacgaagagcatcaggggctcgcgccagccgaactgttcgccaggctcaaggcgcgcatgcccgacggcgaggatctcgtcgtgacccatggcgatgcctgcttgccgaatatcatggtggaaaatggccgcttttctggattcatcgactgtggccggctgggtgtggcggaccgctatcaggacatagcgttggctacccgtgatattgctgaagagcttggcggcgaatgggctgaccgcttcctcgtgctttacggtatcgccgctcccgattcgcagcgcatcgccttctatcgccttcttgacgagttcttctgagcgggactctggggttcgaaatgaccgaccaagcgacgcccaacctgccatcacgagatttcgattccaccgccgccttctatgaaaggttgggcttcggaatcgttttccgggacgccggctggatgatcctccagcgcggggatctcatgctggagttcttcgcccaccccaacttgtttattgcagcttataatggttacaaataaagcaatagcatcacaaatttcacaaataaagcatttttttcactgcattctagttgtggtttgtccaaactcatcaatgtatcttatcatgtctgtataccgtcgacctctagctagagcttggcgtaatcatggtcatagctgtttcctgtgtgaaattgttatccgctcacaattccacacaacatacgagccggaagcataaagtgtaaagcctggggtgcctaatgagtgagctaactcacattaattgcgttgcgctcactgcccgctttccagtcgggaaacctgtcgtgccagctgcattaatgaatcggccaacgcgcggggagaggcggtttgcgtattgggcgctcttccgcttcctcgctcactgactcgctgcgctcggtcgttcggctgcggcgagcggtatcagctcactcaaaggcggtaatacggttatccacagaatcaggggataacgcaggaaagaacatgtgagcaaaaggccagcaaaaggccaggaaccgtaaaaaggccgcgttgctggcgtttttccataggctccgcccccctgacgagcatcacaaaaatcgacgctcaagtcagaggtggcgaaacccgacaggactataaagataccaggcgtttccccctggaagctccctcgtgcgctctcctgttccgaccctgccgcttaccggatacctgtccgcctttctcccttcgggaagcgtggcgctttctcatagctcacgctgtaggtatctcagttcggtgtaggtcgttcgctccaagctgggctgtgtgcacgaaccccccgttcagcccgaccgctgcgccttatccggtaactatcgtcttgagtccaacccggtaagacacgacttatcgccactggcagcagccactggtaacaggattagcagagcgaggtatgtaggcggtgctacagagttcttgaagtggtggcctaactacggctacactagaagaacagtatttggtatctgcgctctgctgaagccagttaccttcggaaaaagagttggtagctcttgatccggcaaacaaaccaccgctggtagcggtttttttgtttgcaagcagcagattacgcgcagaaaaaaaggatctcaagaagatcctttgatcttttctacggggtctgacgctcagtggaacgaaaactcacgttaagggattttggtcatgagattatcaaaaaggatcttcacctagatccttttaaattaaaaatgaagttttaaatcaatctaaagtatatatgagtaaacttggtctgacagttaccaatgcttaatcagtgaggcacctatctcagcgatctgtctatttcgttcatccatagttgcctgactccccgtcgtgtagataactacgatacgggagggcttaccatctggccccagtgctgcaatgataccgcgagacccacgctcaccggctccagatttatcagcaataaaccagccagccggaagggccgagcgcagaagtggtcctgcaactttatccgcctccatccagtctattaattgttgccgggaagctagagtaagtagttcgccagttaatagtttgcgcaacgttgttgccattgctacaggcatcgtggtgtcacgctcgtcgtttggtatggcttcattcagctccggttcccaacgatcaaggcgagttacatgatcccccatgttgtgcaaaaaagcggttagctccttcggtcctccgatcgttgtcagaagtaagttggccgcagtgttatcactcatggttatggcagcactgcataattctcttactgtcatgccatccgtaagatgcttttctgtgactggtgagtactcaaccaagtcattctgagaatagtgtatgcggcgaccgagttgctcttgcccggcgtcaatacgggataataccgcgccacatagcagaactttaaaagtgctcatcattggaaaacgttcttcggggcgaaaactctcaaggatcttaccgctgttgagatccagttcgatgtaacccactcgtgcacccaactgatcttcagcatcttttactttcaccagcgtttctgggtgagcaaaaacaggaaggcaaaatgccgcaaaaaagggaataagggcgacacggaaatgttgaatactcatactcttcctttttcaatattattgaagcatttatcagggttattgtctcatgagcggatacatatttgaatgtatttagaaaaataaacaaataggggttccgcgcacatttccccgaaaagtgccacctgacgtc

SEQ ID NO: 190 - DNA, 6696 bp, Artificial Sequence
  Synthetic
gacggatcgggagatctcccgatcccctatggtgcactctcagtacaatctgctctgatgccgcatagttaagccagtatctgctccctgcttgtgtgttggaggtcgctgagtagtgcgcgagcaaaatttaagctacaacaaggcaaggcttgaccgacaattgcatgaagaatctgcttagggttaggcgttttgcgctgcttcgcgatgtacgggccagatatacgcgttgacattgattattgactagttattaatagtaatcaattacggggtcattagttcatagcccatatatggagttccgcgttacataacttacggtaaatggcccgcctggctgaccgcccaacgacccccgcccattgacgtcaataatgacgtatgttcccatagtaacgccaatagggactttccattgacgtcaatgggtggagtatttacggtaaactgcccacttggcagtacatcaagtgtatcatatgccaagtacgccccctattgacgtcaatgacggtaaatggcccgcctggcattatgcccagtacatgaccttatgggactttcctacttggcagtacatctacgtattagtcatcgctattaccatggtgatgcggttttggcagtacatcaatgggcgtggatagcggtttgactcacggggatttccaagtctccaccccattgacgtcaatgggagtttgttttggcaccaaaatcaacgggactttccaaaatgtcgtaacaactccgccccattgacgcaaatgggcggtaggcgtgtacggtgggaggtctatataagcagagctctctggctaactagagaacccactgcttactggcttatcgaaattaatacgactcactatagggagacccaagctggctagcgtttaaacttaagcttggtaccgagctcggatccgccaccatgggcaaacggacagccgacggaagcgagttcgagtcaccgaaaaagaagcgaaaagttggctccggaatggccttcctgtttagcccaaaggccaggtctttcagcgacgagtccctggagtcttacctgctgcgcgtggtggccgagaacttctttgattcttatcagcagctgagcctggccatcagggaggagctgcacgagctggacttcgaggcacacggagcatttccagtggagctgaagagactgaacgtgtaccacgccaagcacaatagccactttcggatgagagccctgggactgctggagtccctgctggatctgccccctcacgagctgcagaagctggccctgctgcggagcaacaagagattcgtgggaggaatgtccgccgtgcacaggaatggcgtggacatccctctgtcttttatcagatgcgccgacgaggatggcatcgagagcctgccaatctgcccccagtgtctgaaggaggagccttacatccggcaggcctggcacatcaagccaatcgaggtgtgcgccaagcacgagtgtgagctgatccaccactgccctgattgtcagcagccaatctcctatatcgagaatgagtccatcacccactgctcttgtggcttcgagtttgccacagccagctccgagaaggccgactctcaggccgtggtgctgtccaggtctctgttcgacggcgatgccctgtctaacaatcccctgctgttcatgggcaccagcgtgacacacaggtttgccgccctgctgtggtatctgaagcgccacgtgcagaacatcgagtgcaagctggatgagtccgtgaactacttcgaggcctggcctgagaacttctaccaggagctggacgagctgctggccggagccgagctgaagctgatcgatctgttcaatcggaccagcctgtccttcatctttggcgagctgatcctgcagagccagtgtctgctgcccgaggacaagacacctcactttatcgatatgggcctgatggagtatctgggcaagctggtggagagccacccaaagtccaagaagcccaacgtggccgatatgctggtgtccgtgaccgagacagccgtgctgctgtctaccagccacgagcaggtgtacaggctgtatcaggacggcgtgctgaccgccggcttcaagcagaagatcaggacacgcatcgatccccacatcggcgtgttctacctgcgccaggtcatcgagtataagacatcctttggcaatgacaagcagggcatgtatctgtctgcctggtgagcggccgctcgagtctagagggcccgtttaaacccgctgatcagcctcgactgtgccttctagttgccagccatctgttgtttgcccctcccccgtgccttccttgaccctggaaggtgccactcccactgtcctttcctaataaaatgaggaaattgcatcgcattgtctgagtaggtgtcattctattctggggggtggggtggggcaggacagcaagggggaggattgggaagacaatagcaggcatgctggggatgcggtgggctctatggcttctgaggcggaaagaaccagctggggctctagggggtatccccacgcgccctgtagcggcgcattaagcgcggcgggtgtggtggttacgcgcagcgtgaccgctacacttgccagcgccctagcgcccgctcctttcgctttcttcccttcctttctcgccacgttcgccggctttccccgtcaagctctaaatcgggggctccctttagggttccgatttagtgctttacggcacctcgaccccaaaaaacttgattagggtgatggttcacgtagtgggccatcgccctgatagacggtttttcgccctttgacgttggagtccacgttctttaatagtggactcttgttccaaactggaacaacactcaaccctatctcggtctattcttttgatttataagggattttgccgatttcggcctattggttaaaaaatgagctgatttaacaaaaatttaacgcgaattaattctgtggaatgtgtgtcagttagggtgtggaaagtccccaggctccccagcaggcagaagtatgcaaagcatgcatctcaattagtcagcaaccaggtgtggaaagtccccaggctccccagcaggcagaagtatgcaaagcatgcatctcaattagtcagcaaccatagtcccgcccctaactccgcccatcccgcccctaactccgcccagttccgcccattctccgccccatggctgactaattttttttatttatgcagaggccgaggccgcctctgcctctgagctattccagaagtagtgaggaggcttttttggaggcctaggcttttgcaaaaagctcccgggagcttgtatatccattttcggatctgatcaagagacaggatgaggatcgtttcgcatgattgaacaagatggattgcacgcaggttctccggccgcttgggtggagaggctattcggctatgactgggcacaacagacaatcggctgctctgatgccgccgtgttccggctgtcagcgcaggggcgcccggttctttttgtcaagaccgacctgtccggtgccctgaatgaactgcaggacgaggcagcgcggctatcgtggctggccacgacgggcgttccttgcgcagctgtgctcgacgttgtcactgaagcgggaagggactggctgctattgggcgaagtgccggggcaggatctcctgtcatctcaccttgctcctgccgagaaagtatccatcatggctgatgcaatgcggcggctgcatacgcttgatccggctacctgcccattcgaccaccaagcgaaacatcgcatcgagcgagcacgtactcggatggaagccggtcttgtcgatcaggatgatctggacgaagagcatcaggggctcgcgccagccgaactgttcgccaggctcaaggcgcgcatgcccgacggcgaggatctcgtcgtgacccatggcgatgcctgcttgccgaatatcatggtggaaaatggccgcttttctggattcatcgactgtggccggctgggtgtggcggaccgctatcaggacatagcgttggctacccgtgatattgctgaagagcttggcggcgaatgggctgaccgcttcctcgtgctttacggtatcgccgctcccgattcgcagcgcatcgccttctatcgccttcttgacgagttcttctgagcgggactctggggttcgaaatgaccgaccaagcgacgcccaacctgccatcacgagatttcgattccaccgccgccttctatgaaaggttgggcttcggaatcgttttccgggacgccggctggatgatcctccagcgcggggatctcatgctggagttcttcgcccaccccaacttgtttattgcagcttataatggttacaaataaagcaatagcatcacaaatttcacaaataaagcatttttttcactgcattctagttgtggtttgtccaaactcatcaatgtatcttatcatgtctgtataccgtcgacctctagctagagcttggcgtaatcatggtcatagctgtttcctgtgtgaaattgttatccgctcacaattccacacaacatacgagccggaagcataaagtgtaaagcctggggtgcctaatgagtgagctaactcacattaattgcgttgcgctcactgcccgctttccagtcgggaaacctgtcgtgccagctgcattaatgaatcggccaacgcgcggggagaggcggtttgcgtattgggcgctcttccgcttcctcgctcactgactcgctgcgctcggtcgttcggctgcggcgagcggtatcagctcactcaaaggcggtaatacggttatccacagaatcaggggataacgcaggaaagaacatgtgagcaaaaggccagcaaaaggccaggaaccgtaaaaaggccgcgttgctggcgtttttccataggctccgcccccctgacgagcatcacaaaaatcgacgctcaagtcagaggtggcgaaacccgacaggactataaagataccaggcgtttccccctggaagctccctcgtgcgctctcctgttccgaccctgccgcttaccggatacctgtccgcctttctcccttcgggaagcgtggcgctttctcatagctcacgctgtaggtatctcagttcggtgtaggtcgttcgctccaagctgggctgtgtgcacgaaccccccgttcagcccgaccgctgcgccttatccggtaactatcgtcttgagtccaacccggtaagacacgacttatcgccactggcagcagccactggtaacaggattagcagagcgaggtatgtaggcggtgctacagagttcttgaagtggtggcctaactacggctacactagaagaacagtatttggtatctgcgctctgctgaagccagttaccttcggaaaaagagttggtagctcttgatccggcaaacaaaccaccgctggtagcggtttttttgtttgcaagcagcagattacgcgcagaaaaaaaggatctcaagaagatcctttgatcttttctacggggtctgacgctcagtggaacgaaaactcacgttaagggattttggtcatgagattatcaaaaaggatcttcacctagatccttttaaattaaaaatgaagttttaaatcaatctaaagtatatatgagtaaacttggtctgacagttaccaatgcttaatcagtgaggcacctatctcagcgatctgtctatttcgttcatccatagttgcctgactccccgtcgtgtagataactacgatacgggagggcttaccatctggccccagtgctgcaatgataccgcgagacccacgctcaccggctccagatttatcagcaataaaccagccagccggaagggccgagcgcagaagtggtcctgcaactttatccgcctccatccagtctattaattgttgccgggaagctagagtaagtagttcgccagttaatagtttgcgcaacgttgttgccattgctacaggcatcgtggtgtcacgctcgtcgtttggtatggcttcattcagctccggttcccaacgatcaaggcgagttacatgatcccccatgttgtgcaaaaaagcggttagctccttcggtcctccgatcgttgtcagaagtaagttggccgcagtgttatcactcatggttatggcagcactgcataattctcttactgtcatgccatccgtaagatgcttttctgtgactggtgagtactcaaccaagtcattctgagaatagtgtatgcggcgaccgagttgctcttgcccggcgtcaatacgggataataccgcgccacatagcagaactttaaaagtgctcatcattggaaaacgttcttcggggcgaaaactctcaaggatcttaccgctgttgagatccagttcgatgtaacccactcgtgcacccaactgatcttcagcatcttttactttcaccagcgtttctgggtgagcaaaaacaggaaggcaaaatgccgcaaaaaagggaataagggcgacacggaaatgttgaatactcatactcttcctttttcaatattattgaagcatttatcagggttattgtctcatgagcggatacatatttgaatgtatttagaaaaataaacaaataggggttccgcgcacatttccccgaaaagtgccacctgacgtc

SEQ ID NO: 191 - DNA, 7560 bp, Artificial Sequence
  Synthetic
gacggatcgggagatctcccgatcccctatggtgcactctcagtacaatctgctctgatgccgcatagttaagccagtatctgctccctgcttgtgtgttggaggtcgctgagtagtgcgcgagcaaaatttaagctacaacaaggcaaggcttgaccgacaattgcatgaagaatctgcttagggttaggcgttttgcgctgcttcgcgatgtacgggccagatatacgcgttgacattgattattgactagttattaatagtaatcaattacggggtcattagttcatagcccatatatggagttccgcgttacataacttacggtaaatggcccgcctggctgaccgcccaacgacccccgcccattgacgtcaataatgacgtatgttcccatagtaacgccaatagggactttccattgacgtcaatgggtggagtatttacggtaaactgcccacttggcagtacatcaagtgtatcatatgccaagtacgccccctattgacgtcaatgacggtaaatggcccgcctggcattatgcccagtacatgaccttatgggactttcctacttggcagtacatctacgtattagtcatcgctattaccatggtgatgcggttttggcagtacatcaatgggcgtggatagcggtttgactcacggggatttccaagtctccaccccattgacgtcaatgggagtttgttttggcaccaaaatcaacgggactttccaaaatgtcgtaacaactccgccccattgacgcaaatgggcggtaggcgtgtacggtgggaggtctatataagcagagctctctggctaactagagaacccactgcttactggcttatcgaaattaatacgactcactatagggagacccaagctggctagcgtttaaacttaagcttggtaccgagctcggatccgccaccatgggcaaacggacagccgacggaagcgagttcgagtcaccgaaaaagaagcgaaaagttggctccggaatggtggacaagctgaagttccacgagctgctggatatcgacgatatctccgagcggaacatcgccctgcggagagcctttaccggctacacagtgccaatggacgtgaccggcaacgaggcctctgccctgaccatcctgctgaatctgacatatccccggaagagagtggacgatctgctggataagagactggccaagcagaccctgaacacagatgcccacctggacgcctccatcgatgaggtgcagtggctgcacacccacaatctgaagtaccccgacatcagggtgtctaagcagcgcctgatcacagccagccctctgtcccactctcacatcctgagctccgccaactgcatcagcaccctgggctggtcccacgattctgccaaggtgaacctggccaagctgttctcctgtcactttaattggcaggaccgggtgtgctgtctggccacactgctgtctgatccccctaagatttggaaggaggccttccaggccctgggcatgctggtgaaggactttatgaatctgtgcggcaggatcaaggccagcctgccatcctacgagagcccctcccgcgtggacaagtattctatccaggtgcggctgccttacagagatggctatctggccatcaccccagtggtgagccacgccctgcaggcagagatccagcaggcagcaatggccaagcagtgtaggtacaccaacttcgagtttacacgcccagcagccgtgtccgagctgtctgccagcctgggaggaaacgtgaaggccctgaattatccacccaggatcggcaatgccgtgcacggcctgtccgattcttggctgctgaagttccaggcaggacagacagtgctgaaccagggcgccctgtctcagccaaggttcaagcgcgccctggagggactgctgagcaatggctttgagctggccctgaagcagaggcgcctgcacaaggtggcctccatgaggcagatcagagccaccctgacagagtggctgtctccactgctggagtggcgcctggaggtggaggagaacaagaacaacgtgagcgagctggcctgcatccacggctctttcgagtaccagtttctgaccgcccagaaggagaacctggtgggcctgctgaatcccatgttcagcctgctgaataccatcctgagcaactccaatacactgcagaagtatgcctttcaccagaggctgatgcgccctctgaagtgcagcctgaagtggctgctggacaacctgtctaaggagagcaatgccatcgactccgatgaggacaaccagcagagatacctgtatctgaagggcatcagagtgtttgatgcccaggccctgagcaatccttactgtgcaggactgccatccctgaccgccgtgtggggcatggtgcacaactatcagcggagactgaataagcggctgggcacccagctgagactgacatctttcagctggtttatcaggcagtactctagcgtggccggcaagaagctgcctgagtatggcatgcagggccagaaggagaaccagttcaggcgcgccggcatcgtggacaataagcactgtgacctggtgtttgatctggtggtgcacatcgatggctacgaggaggatctggacgccatcgacaacagcaccgatgccatcaaggcctccttccctgccacatttgccggcggcgtgatgcaccctccagagatcggctccgtggacgagtggtgcgagctgtacccatccgagacctctctgtatagcaagctgcggagactgccagccagcggcaagtgggtcatgcccaccagataccagatggattccctggacggcctgctgcagctgctgaagctgaacgtggccctgtgccccgtgatgagcggctacctgatgctgggcccccctgagtcccgcaagaacagcctggagcccctgcactgctatgccgagcctgcaatcggagtggtggagtgtgcaaccgcaatcgacatcaggctgcagggaatgtctaatttctttaggcgcgccttctggatgctggatatcaaggagacaagcatgctgatgaagagaatctgagcggccgctcgagtctagagggcccgtttaaacccgctgatcagcctcgactgtgccttctagttgccagccatctgttgtttgcccctcccccgtgccttccttgaccctggaaggtgccactcccactgtcctttcctaataaaatgaggaaattgcatcgcattgtctgagtaggtgtcattctattctggggggtggggtggggcaggacagcaagggggaggattgggaagacaatagcaggcatgctggggatgcggtgggctctatggcttctgaggcggaaagaaccagctggggctctagggggtatccccacgcgccctgtagcggcgcattaagcgcggcgggtgtggtggttacgcgcagcgtgaccgctacacttgccagcgccctagcgcccgctcctttcgctttcttcccttcctttctcgccacgttcgccggctttccccgtcaagctctaaatcgggggctccctttagggttccgatttagtgctttacggcacctcgaccccaaaaaacttgattagggtgatggttcacgtagtgggccatcgccctgatagacggtttttcgccctttgacgttggagtccacgttctttaatagtggactcttgttccaaactggaacaacactcaaccctatctcggtctattcttttgatttataagggattttgccgatttcggcctattggttaaaaaatgagctgatttaacaaaaatttaacgcgaattaattctgtggaatgtgtgtcagttagggtgtggaaagtccccaggctccccagcaggcagaagtatgcaaagcatgcatctcaattagtcagcaaccaggtgtggaaagtccccaggctccccagcaggcagaagtatgcaaagcatgcatctcaattagtcagcaaccatagtcccgcccctaactccgcccatcccgcccctaactccgcccagttccgcccattctccgccccatggctgactaattttttttatttatgcagaggccgaggccgcctctgcctctgagctattccagaagtagtgaggaggcttttttggaggcctaggcttttgcaaaaagctcccgggagcttgtatatccattttcggatctgatcaagagacaggatgaggatcgtttcgcatgattgaacaagatggattgcacgcaggttctccggccgcttgggtggagaggctattcggctatgactgggcacaacagacaatcggctgctctgatgccgccgtgttccggctgtcagcgcaggggcgcccggttctttttgtcaagaccgacctgtccggtgccctgaatgaactgcaggacgaggcagcgcggctatcgtggctggccacgacgggcgttccttgcgcagctgtgctcgacgttgtcactgaagcgggaagggactggctgctattgggcgaagtgccggggcaggatctcctgtcatctcaccttgctcctgccgagaaagtatccatcatggctgatgcaatgcggcggctgcatacgcttgatccggctacctgcccattcgaccaccaagcgaaacatcgcatcgagcgagcacgtactcggatggaagccggtcttgtcgatcaggatgatctggacgaagagcatcaggggctcgcgccagccgaactgttcgccaggctcaaggcgcgcatgcccgacggcgaggatctcgtcgtgacccatggcgatgcctgcttgccgaatatcatggtggaaaatggccgcttttctggattcatcgactgtggccggctgggtgtggcggaccgctatcaggacatagcgttggctacccgtgatattgctgaagagcttggcggcgaatgggctgaccgcttcctcgtgctttacggtatcgccgctcccgattcgcagcgcatcgccttctatcgccttcttgacgagttcttctgagcgggactctggggttcgaaatgaccgaccaagcgacgcccaacctgccatcacgagatttcgattccaccgccgccttctatgaaaggttgggcttcggaatcgttttccgggacgccggctggatgatcctccagcgcggggatctcatgctggagttcttcgcccaccccaacttgtttattgcagcttataatggttacaaataaagcaatagcatcacaaatttcacaaataaagcatttttttcactgcattctagttgtggtttgtccaaactcatcaatgtatcttatcatgtctgtataccgtcgacctctagctagagcttggcgtaatcatggtcatagctgtttcctgtgtgaaattgttatccgctcacaattccacacaacatacgagccggaagcataaagtgtaaagcctggggtgcctaatgagtgagctaactcacattaattgcgttgcgctcactgcccgctttccagtcgggaaacctgtcgtgccagctgcattaatgaatcggccaacgcgcggggagaggcggtttgcgtattgggcgctcttccgcttcctcgctcactgactcgctgcgctcggtcgttcggctgcggcgagcggtatcagctcactcaaaggcggtaatacggttatccacagaatcaggggataacgcaggaaagaacatgtgagcaaaaggccagcaaaaggccaggaaccgtaaaaaggccgcgttgctggcgtttttccataggctccgcccccctgacgagcatcacaaaaatcgacgctcaagtcagaggtggcgaaacccgacaggactataaagataccaggcgtttccccctggaagctccctcgtgcgctctcctgttccgaccctgccgcttaccggatacctgtccgcctttctcccttcgggaagcgtggcgctttctcatagctcacgctgtaggtatctcagttcggtgtaggtcgttcgctccaagctgggctgtgtgcacgaaccccccgttcagcccgaccgctgcgccttatccggtaactatcgtcttgagtccaacccggtaagacacgacttatcgccactggcagcagccactggtaacaggattagcagagcgaggtatgtaggcggtgctacagagttcttgaagtggtggcctaactacggctacactagaagaacagtatttggtatctgcgctctgctgaagccagttaccttcggaaaaagagttggtagctcttgatccggcaaacaaaccaccgctggtagcggtttttttgtttgcaagcagcagattacgcgcagaaaaaaaggatctcaagaagatcctttgatcttttctacggggtctgacgctcagtggaacgaaaactcacgttaagggattttggtcatgagattatcaaaaaggatcttcacctagatccttttaaattaaaaatgaagttttaaatcaatctaaagtatatatgagtaaacttggtctgacagttaccaatgcttaatcagtgaggcacctatctcagcgatctgtctatttcgttcatccatagttgcctgactccccgtcgtgtagataactacgatacgggagggcttaccatctggccccagtgctgcaatgataccgcgagacccacgctcaccggctccagatttatcagcaataaaccagccagccggaagggccgagcgcagaagtggtcctgcaactttatccgcctccatccagtctattaattgttgccgggaagctagagtaagtagttcgccagttaatagtttgcgcaacgttgttgccattgctacaggcatcgtggtgtcacgctcgtcgtttggtatggcttcattcagctccggttcccaacgatcaaggcgagttacatgatcccccatgttgtgcaaaaaagcggttagctccttcggtcctccgatcgttgtcagaagtaagttggccgcagtgttatcactcatggttatggcagcactgcataattctcttactgtcatgccatccgtaagatgcttttctgtgactggtgagtactcaaccaagtcattctgagaatagtgtatgcggcgaccgagttgctcttgcccggcgtcaatacgggataataccgcgccacatagcagaactttaaaagtgctcatcattggaaaacgttcttcggggcgaaaactctcaaggatcttaccgctgttgagatccagttcgatgtaacccactcgtgcacccaactgatcttcagcatcttttactttcaccagcgtttctgggtgagcaaaaacaggaaggcaaaatgccgcaaaaaagggaataagggcgacacggaaatgttgaatactcatactcttcctttttcaatattattgaagcatttatcagggttattgtctcatgagcggatacatatttgaatgtatttagaaaaataaacaaataggggttccgcgcacatttccccgaaaagtgccacctgacgtc

SEQ ID NO: 192 - DNA, 6558 bp, Artificial Sequence
  Synthetic
gacggatcgggagatctcccgatcccctatggtgcactctcagtacaatctgctctgatgccgcatagttaagccagtatctgctccctgcttgtgtgttggaggtcgctgagtagtgcgcgagcaaaatttaagctacaacaaggcaaggcttgaccgacaattgcatgaagaatctgcttagggttaggcgttttgcgctgcttcgcgatgtacgggccagatatacgcgttgacattgattattgactagttattaatagtaatcaattacggggtcattagttcatagcccatatatggagttccgcgttacataacttacggtaaatggcccgcctggctgaccgcccaacgacccccgcccattgacgtcaataatgacgtatgttcccatagtaacgccaatagggactttccattgacgtcaatgggtggagtatttacggtaaactgcccacttggcagtacatcaagtgtatcatatgccaagtacgccccctattgacgtcaatgacggtaaatggcccgcctggcattatgcccagtacatgaccttatgggactttcctacttggcagtacatctacgtattagtcatcgctattaccatggtgatgcggttttggcagtacatcaatgggcgtggatagcggtttgactcacggggatttccaagtctccaccccattgacgtcaatgggagtttgttttggcaccaaaatcaacgggactttccaaaatgtcgtaacaactccgccccattgacgcaaatgggcggtaggcgtgtacggtgggaggtctatataagcagagctctctggctaactagagaacccactgcttactggcttatcgaaattaatacgactcactatagggagacccaagctggctagcgtttaaacttaagcttggtaccgagctcggatccgccaccatgggcaaacggacagccgacggaagcgagttcgagtcaccgaaaaagaagcgaaaagttggctccggaatggagctgtgcaacgtgctgaagtacgaccggagcctgtatcccggcaaggccgtgttcttttacaagaccgccgagtccgattttgtgcctctggaggccgagatcaatcggatcagaggccagaaggccggcttcaccgaggcctttacaccccagttcaagagcaagaacctggcccctcaggacctggcccactgcaatccactgatcctggaggagtgttatgtgccccctaacgtggagtacatctattgcaggttttctctgcgcgtgcaggccaatagcctgaagccagcaggatgttccgagccaaccgtgttcgcactgctggaggagtttgccgccatcttcaaggcctgcggaggatacaaggagctggccacaaggtattgtaagaacgtgctgctgggcacctggctgtggcgcaaccagaatacaggcaattctcagatcgatatcaagaccagcgccggcaactgttaccagatcgccaatacacggcagctggcctgggactccagatggccagcagatgcacagcaggtgctggaggagctgtctgacgaggtgcaccaggccctgaccgatcccacagtgttctggcacgccaacatcaccgccaagatcgagacagccttttgccaggaaatctacccaagccagtccttcggcgagaaggcagcacagggagaggcctctaagcagtttgccaaggtgaagtgcgtggacggcagatatgccgtgagcttcaattccgtgaagatcggcgccgccctgcagctgatcgacgattggtgggacgtggacgattccaagcggctgagaatccacgagtacggagcagataaggagctgggagtggcaaggagagcccctgagtctaagcagagcttttactccctgttcatcaacaccgagctgtatctggccgagctgaatcagcagctggccgaggatgagtattctatcagcccaaacatctactatctgtttgccgtgctgatcaagggcggcatgttccagaagaaggccgaggccaagtccaagtctaaggccgagacctccacagccaagatcacacctgccaaggcctgagcggccgctcgagtctagagggcccgtttaaacccgctgatcagcctcgactgtgccttctagttgccagccatctgttgtttgcccctcccccgtgccttccttgaccctggaaggtgccactcccactgtcctttcctaataaaatgaggaaattgcatcgcattgtctgagtaggtgtcattctattctggggggtggggtggggcaggacagcaagggggaggattgggaagacaatagcaggcatgctggggatgcggtgggctctatggcttctgaggcggaaagaaccagctggggctctagggggtatccccacgcgccctgtagcggcgcattaagcgcggcgggtgtggtggttacgcgcagcgtgaccgctacacttgccagcgccctagcgcccgctcctttcgctttcttcccttcctttctcgccacgttcgccggctttccccgtcaagctctaaatcgggggctccctttagggttccgatttagtgctttacggcacctcgaccccaaaaaacttgattagggtgatggttcacgtagtgggccatcgccctgatagacggtttttcgccctttgacgttggagtccacgttctttaatagtggactcttgttccaaactggaacaacactcaaccctatctcggtctattcttttgatttataagggattttgccgatttcggcctattggttaaaaaatgagctgatttaacaaaaatttaacgcgaattaattctgtggaatgtgtgtcagttagggtgtggaaagtccccaggctccccagcaggcagaagtatgcaaagcatgcatctcaattagtcagcaaccaggtgtggaaagtccccaggctccccagcaggcagaagtatgcaaagcatgcatctcaattagtcagcaaccatagtcccgcccctaactccgcccatcccgcccctaactccgcccagttccgcccattctccgccccatggctgactaattttttttatttatgcagaggccgaggccgcctctgcctctgagctattccagaagtagtgaggaggcttttttggaggcctaggcttttgcaaaaagctcccgggagcttgtatatccattttcggatctgatcaagagacaggatgaggatcgtttcgcatgattgaacaagatggattgcacgcaggttctccggccgcttgggtggagaggctattcggctatgactgggcacaacagacaatcggctgctctgatgccgccgtgttccggctgtcagcgcaggggcgcccggttctttttgtcaagaccgacctgtccggtgccctgaatgaactgcaggacgaggcagcgcggctatcgtggctggccacgacgggcgttccttgcgcagctgtgctcgacgttgtcactgaagcgggaagggactggctgctattgggcgaagtgccggggcaggatctcctgtcatctcaccttgctcctgccgagaaagtatccatcatggctgatgcaatgcggcggctgcatacgcttgatccggctacctgcccattcgaccaccaagcgaaacatcgcatcgagcgagcacgtactcggatggaagccggtcttgtcgatcaggatgatctggacgaagagcatcaggggctcgcgccagccgaactgttcgccaggctcaaggcgcgcatgcccgacggcgaggatctcgtcgtgacccatggcgatgcctgcttgccgaatatcatggtggaaaatggccgcttttctggattcatcgactgtggccggctgggtgtggcggaccgctatcaggacatagcgttggctacccgtgatattgctgaagagcttggcggcgaatgggctgaccgcttcctcgtgctttacggtatcgccgctcccgattcgcagcgcatcgccttctatcgccttcttgacgagttcttctgagcgggactctggggttcgaaatgaccgaccaagcgacgcccaacctgccatcacgagatttcgattccaccgccgccttctatgaaaggttgggcttcggaatcgttttccgggacgccggctggatgatcctccagcgcggggatctcatgctggagttcttcgcccaccccaacttgtttattgcagcttataatggttacaaataaagcaatagcatcacaaatttcacaaataaagcatttttttcactgcattctagttgtggtttgtccaaactcatcaatgtatcttatcatgtctgtataccgtcgacctctagctagagcttggcgtaatcatggtcatagctgtttcctgtgtgaaattgttatccgctcacaattccacacaacatacgagccggaagcataaagtgtaaagcctggggtgcctaatgagtgagctaactcacattaattgcgttgcgctcactgcccgctttccagtcgggaaacctgtcgtgccagctgcattaatgaatcggccaacgcgcggggagaggcggtttgcgtattgggcgctcttccgcttcctcgctcactgactcgctgcgctcggtcgttcggctgcggcgagcggtatcagctcactcaaaggcggtaatacggttatccacagaatcaggggataacgcaggaaagaacatgtgagcaaaaggccagcaaaaggccaggaaccgtaaaaaggccgcgttgctggcgtttttccataggctccgcccccctgacgagcatcacaaaaatcgacgctcaagtcagaggtggcgaaacccgacaggactataaagataccaggcgtttccccctggaagctccctcgtgcgctctcctgttccgaccctgccgcttaccggatacctgtccgcctttctcccttcgggaagcgtggcgctttctcatagctcacgctgtaggtatctcagttcggtgtaggtcgttcgctccaagctgggctgtgtgcacgaaccccccgttcagcccgaccgctgcgccttatccggtaactatcgtcttgagtccaacccggtaagacacgacttatcgccactggcagcagccactggtaacaggattagcagagcgaggtatgtaggcggtgctacagagttcttgaagtggtggcctaactacggctacactagaagaacagtatttggtatctgcgctctgctgaagccagttaccttcggaaaaagagttggtagctcttgatccggcaaacaaaccaccgctggtagcggtttttttgtttgcaagcagcagattacgcgcagaaaaaaaggatctcaagaagatcctttgatcttttctacggggtctgacgctcagtggaacgaaaactcacgttaagggattttggtcatgagattatcaaaaaggatcttcacctagatccttttaaattaaaaatgaagttttaaatcaatctaaagtatatatgagtaaacttggtctgacagttaccaatgcttaatcagtgaggcacctatctcagcgatctgtctatttcgttcatccatagttgcctgactccccgtcgtgtagataactacgatacgggagggcttaccatctggccccagtgctgcaatgataccgcgagacccacgctcaccggctccagatttatcagcaataaaccagccagccggaagggccgagcgcagaagtggtcctgcaactttatccgcctccatccagtctattaattgttgccgggaagctagagtaagtagttcgccagttaatagtttgcgcaacgttgttgccattgctacaggcatcgtggtgtcacgctcgtcgtttggtatggcttcattcagctccggttcccaacgatcaaggcgagttacatgatcccccatgttgtgcaaaaaagcggttagctccttcggtcctccgatcgttgtcagaagtaagttggccgcagtgttatcactcatggttatggcagcactgcataattctcttactgtcatgccatccgtaagatgcttttctgtgactggtgagtactcaaccaagtcattctgagaatagtgtatgcggcgaccgagttgctcttgcccggcgtcaatacgggataataccgcgccacatagcagaactttaaaagtgctcatcattggaaaacgttcttcggggcgaaaactctcaaggatcttaccgctgttgagatccagttcgatgtaacccactcgtgcacccaactgatcttcagcatcttttactttcaccagcgtttctgggtgagcaaaaacaggaaggcaaaatgccgcaaaaaagggaataagggcgacacggaaatgttgaatactcatactcttcctttttcaatattattgaagcatttatcagggttattgtctcatgagcggatacatatttgaatgtatttagaaaaataaacaaataggggttccgcgcacatttccccgaaaagtgccacctgacgtc

SEQ ID NO: 193 - DNA, 6060 bp, Artificial Sequence
  Synthetic
gacggatcgggagatctcccgatcccctatggtgcactctcagtacaatctgctctgatgccgcatagttaagccagtatctgctccctgcttgtgtgttggaggtcgctgagtagtgcgcgagcaaaatttaagctacaacaaggcaaggcttgaccgacaattgcatgaagaatctgcttagggttaggcgttttgcgctgcttcgcgatgtacgggccagatatacgcgttgacattgattattgactagttattaatagtaatcaattacggggtcattagttcatagcccatatatggagttccgcgttacataacttacggtaaatggcccgcctggctgaccgcccaacgacccccgcccattgacgtcaataatgacgtatgttcccatagtaacgccaatagggactttccattgacgtcaatgggtggagtatttacggtaaactgcccacttggcagtacatcaagtgtatcatatgccaagtacgccccctattgacgtcaatgacggtaaatggcccgcctggcattatgcccagtacatgaccttatgggactttcctacttggcagtacatctacgtattagtcatcgctattaccatggtgatgcggttttggcagtacatcaatgggcgtggatagcggtttgactcacggggatttccaagtctccaccccattgacgtcaatgggagtttgttttggcaccaaaatcaacgggactttccaaaatgtcgtaacaactccgccccattgacgcaaatgggcggtaggcgtgtacggtgggaggtctatataagcagagctctctggctaactagagaacccactgcttactggcttatcgaaattaatacgactcactatagggagacccaagctggctagcgtttaaacttaagcttggtaccgagctcggatccgccaccatgggcaaacggacagccgacggaagcgagttcgagtcaccgaaaaagaagcgaaaagttggctccggaatgcatagatactacttcatggtgcggtttctgcctgaacaggccaacctggccctgctgatgggcagatgcatcagcatcatgcacggcttcatctgcaagcacgacatccagggcctgggcgtcagcttcccagcctggtccgacgccagcattggaaatatgatcgccttcgtgcacacagacatcgccgctctgaacgagctgaaactgcagggctactttcaggacatgcaggagtgcggcgtcttcaaggtggacaacgtggaagccgtgcctgatgattgcgtggaagtgcggttcaagcggaaccagggcatcgctaagatgttcgtgggcgaggccagaaggcggctgaagagactggaaaagcgcgccctggctagaggcgaagttttcaaccccaacaagaacgacgagcctagagagctggactgttttcactgtatcgccatcggatctaccagcaccgagcaagacttcctgctgcacgtgcagaaggaaatcgtgcagaaatacgaggaacctgagttcaatcaatacggcctggccaccaacaagctgctcagaggaacagtgcccgagttcagcgagttctgagcggccgctcgagtctagagggcccgtttaaacccgctgatcagcctcgactgtgccttctagttgccagccatctgttgtttgcccctcccccgtgccttccttgaccctggaaggtgccactcccactgtcctttcctaataaaatgaggaaattgcatcgcattgtctgagtaggtgtcattctattctggggggtggggtggggcaggacagcaagggggaggattgggaagacaatagcaggcatgctggggatgcggtgggctctatggcttctgaggcggaaagaaccagctggggctctagggggtatccccacgcgccctgtagcggcgcattaagcgcggcgggtgtggtggttacgcgcagcgtgaccgctacacttgccagcgccctagcgcccgctcctttcgctttcttcccttcctttctcgccacgttcgccggctttccccgtcaagctctaaatcgggggctccctttagggttccgatttagtgctttacggcacctcgaccccaaaaaacttgattagggtgatggttcacgtagtgggccatcgccctgatagacggtttttcgccctttgacgttggagtccacgttctttaatagtggactcttgttccaaactggaacaacactcaaccctatctcggtctattcttttgatttataagggattttgccgatttcggcctattggttaaaaaatgagctgatttaacaaaaatttaacgcgaattaattctgtggaatgtgtgtcagttagggtgtggaaagtccccaggctccccagcaggcagaagtatgcaaagcatgcatctcaattagtcagcaaccaggtgtggaaagtccccaggctccccagcaggcagaagtatgcaaagcatgcatctcaattagtcagcaaccatagtcccgcccctaactccgcccatcccgcccctaactccgcccagttccgcccattctccgccccatggctgactaattttttttatttatgcagaggccgaggccgcctctgcctctgagctattccagaagtagtgaggaggcttttttggaggcctaggcttttgcaaaaagctcccgggagcttgtatatccattttcggatctgatcaagagacaggatgaggatcgtttcgcatgattgaacaagatggattgcacgcaggttctccggccgcttgggtggagaggctattcggctatgactgggcacaacagacaatcggctgctctgatgccgccgtgttccggctgtcagcgcaggggcgcccggttctttttgtcaagaccgacctgtccggtgccctgaatgaactgcaggacgaggcagcgcggctatcgtggctggccacgacgggcgttccttgcgcagctgtgctcgacgttgtcactgaagcgggaagggactggctgctattgggcgaagtgccggggcaggatctcctgtcatctcaccttgctcctgccgagaaagtatccatcatggctgatgcaatgcggcggctgcatacgcttgatccggctacctgcccattcgaccaccaagcgaaacatcgcatcgagcgagcacgtactcggatggaagccggtcttgtcgatcaggatgatctggacgaagagcatcaggggctcgcgccagccgaactgttcgccaggctcaaggcgcgcatgcccgacggcgaggatctcgtcgtgacccatggcgatgcctgcttgccgaatatcatggtggaaaatggccgcttttctggattcatcgactgtggccggctgggtgtggcggaccgctatcaggacatagcgttggctacccgtgatattgctgaagagcttggcggcgaatgggctgaccgcttcctcgtgctttacggtatcgccgctcccgattcgcagcgcatcgccttctatcgccttcttgacgagttcttctgagcgggactctggggttcgaaatgaccgaccaagcgacgcccaacctgccatcacgagatttcgattccaccgccgccttctatgaaaggttgggcttcggaatcgttttccgggacgccggctggatgatcctccagcgcggggatctcatgctggagttcttcgcccaccccaacttgtttattgcagcttataatggttacaaataaagcaatagcatcacaaatttcacaaataaagcatttttttcactgcattctagttgtggtttgtccaaactcatcaatgtatcttatcatgtctgtataccgtcgacctctagctagagcttggcgtaatcatggtcatagctgtttcctgtgtgaaattgttatccgctcacaattccacacaacatacgagccggaagcataaagtgtaaagcctggggtgcctaatgagtgagctaactcacattaattgcgttgcgctcactgcccgctttccagtcgggaaacctgtcgtgccagctgcattaatgaatcggccaacgcgcggggagaggcggtttgcgtattgggcgctcttccgcttcctcgctcactgactcgctgcgctcggtcgttcggctgcggcgagcggtatcagctcactcaaaggcggtaatacggttatccacagaatcaggggataacgcaggaaagaacatgtgagcaaaaggccagcaaaaggccaggaaccgtaaaaaggccgcgttgctggcgtttttccataggctccgcccccctgacgagcatcacaaaaatcgacgctcaagtcagaggtggcgaaacccgacaggactataaagataccaggcgtttccccctggaagctccctcgtgcgctctcctgttccgaccctgccgcttaccggatacctgtccgcctttctcccttcgggaagcgtggcgctttctcatagctcacgctgtaggtatctcagttcggtgtaggtcgttcgctccaagctgggctgtgtgcacgaaccccccgttcagcccgaccgctgcgccttatccggtaactatcgtcttgagtccaacccggtaagacacgacttatcgccactggcagcagccactggtaacaggattagcagagcgaggtatgtaggcggtgctacagagttcttgaagtggtggcctaactacggctacactagaagaacagtatttggtatctgcgctctgctgaagccagttaccttcggaaaaagagttggtagctcttgatccggcaaacaaaccaccgctggtagcggtttttttgtttgcaagcagcagattacgcgcagaaaaaaaggatctcaagaagatcctttgatcttttctacggggtctgacgctcagtggaacgaaaactcacgttaagggattttggtcatgagattatcaaaaaggatcttcacctagatccttttaaattaaaaatgaagttttaaatcaatctaaagtatatatgagtaaacttggtctgacagttaccaatgcttaatcagtgaggcacctatctcagcgatctgtctatttcgttcatccatagttgcctgactccccgtcgtgtagataactacgatacgggagggcttaccatctggccccagtgctgcaatgataccgcgagacccacgctcaccggctccagatttatcagcaataaaccagccagccggaagggccgagcgcagaagtggtcctgcaactttatccgcctccatccagtctattaattgttgccgggaagctagagtaagtagttcgccagttaatagtttgcgcaacgttgttgccattgctacaggcatcgtggtgtcacgctcgtcgtttggtatggcttcattcagctccggttcccaacgatcaaggcgagttacatgatcccccatgttgtgcaaaaaagcggttagctccttcggtcctccgatcgttgtcagaagtaagttggccgcagtgttatcactcatggttatggcagcactgcataattctcttactgtcatgccatccgtaagatgcttttctgtgactggtgagtactcaaccaagtcattctgagaatagtgtatgcggcgaccgagttgctcttgcccggcgtcaatacgggataataccgcgccacatagcagaactttaaaagtgctcatcattggaaaacgttcttcggggcgaaaactctcaaggatcttaccgctgttgagatccagttcgatgtaacccactcgtgcacccaactgatcttcagcatcttttactttcaccagcgtttctgggtgagcaaaaacaggaaggcaaaatgccgcaaaaaagggaataagggcgacacggaaatgttgaatactcatactcttcctttttcaatattattgaagcatttatcagggttattgtctcatgagcggatacatatttgaatgtatttagaaaaataaacaaataggggttccgcgcacatttccccgaaaagtgccacctgacgtc

SEQ ID NO: 194 - DNA, 6492 bp, Artificial Sequence
  Synthetic
gacggatcgggagatctcccgatcccctatggtgcactctcagtacaatctgctctgatgccgcatagttaagccagtatctgctccctgcttgtgtgttggaggtcgctgagtagtgcgcgagcaaaatttaagctacaacaaggcaaggcttgaccgacaattgcatgaagaatctgcttagggttaggcgttttgcgctgcttcgcgatgtacgggccagatatacgcgttgacattgattattgactagttattaatagtaatcaattacggggtcattagttcatagcccatatatggagttccgcgttacataacttacggtaaatggcccgcctggctgaccgcccaacgacccccgcccattgacgtcaataatgacgtatgttcccatagtaacgccaatagggactttccattgacgtcaatgggtggagtatttacggtaaactgcccacttggcagtacatcaagtgtatcatatgccaagtacgccccctattgacgtcaatgacggtaaatggcccgcctggcattatgcccagtacatgaccttatgggactttcctacttggcagtacatctacgtattagtcatcgctattaccatggtgatgcggttttggcagtacatcaatgggcgtggatagcggtttgactcacggggatttccaagtctccaccccattgacgtcaatgggagtttgttttggcaccaaaatcaacgggactttccaaaatgtcgtaacaactccgccccattgacgcaaatgggcggtaggcgtgtacggtgggaggtctatataagcagagctctctggctaactagagaacccactgcttactggcttatcgaaattaatacgactcactatagggagacccaagctggctagcgtttaaacttaagcttggtaccgagctcggatccgccaccatgggcaaacggacagccgacggaagcgagttcgagtcaccgaaaaagaagcgaaaagttggctccggaatgaacaccctgacagcccaccagatggagcagctgggccggttcaatgactgctttgtgatgcaccctcaggccaaagtgatcttcaacgattttgacgatctgcgcctgaaccggaatttccagtccgaccagcagtgtatgctgctgaccggcgatacaggcgtgggcaagagccacctgatcaacaattacaagaagagagtgctggcctcccagacctattccaggacatctatgccagtgctggtgacccgcatcagctcccacaagggcctggacgccaccctgcggcagatgctgaccgacctggagagcttcggcagccagcagagaaagggccagaattacaagatcgacctgaagacacagctggtgaagaacctggtgcgggccaatgtggagctgctgatcttcaatgagtttcaggagctgatcgagttcaagaccccaaaggagaggcagacaatcgccaacgagctgaagtttatctctgaggaggcccgcgtgcctatcgtgctggtgggcatgccatggaccgagcagatcgccgaggagccccagtggtctagcaggctgatccggcggcggaagctggagtacttcagcctgcagaaggattccaagtactatcgccagtatctgatcggcctggccaagcacatgcccttcgacgagccccctaagatcgaggataagcacatcgccatccctctgtttgcagcatgcagaggagagtccagggtgctgaaccacctgctgtctgagaccctgaagctggtcatggtgaatggcgaccgctctctggatatccggcacctggcccagacatacagaaagctgtatgagtctcaggagagcgaggccgccagcgtgttctttaacccattcctggagcccctggacaaggtgctgatctctgaggtggtgaagcctagccggtataacccaaatgccatgacccccgatgagatgctgatcaagagagagttttccgccccttctacactggcccagctgctgagcaagtgagcggccgctcgagtctagagggcccgtttaaacccgctgatcagcctcgactgtgccttctagttgccagccatctgttgtttgcccctcccccgtgccttccttgaccctggaaggtgccactcccactgtcctttcctaataaaatgaggaaattgcatcgcattgtctgagtaggtgtcattctattctggggggtggggtggggcaggacagcaagggggaggattgggaagacaatagcaggcatgctggggatgcggtgggctctatggcttctgaggcggaaagaaccagctggggctctagggggtatccccacgcgccctgtagcggcgcattaagcgcggcgggtgtggtggttacgcgcagcgtgaccgctacacttgccagcgccctagcgcccgctcctttcgctttcttcccttcctttctcgccacgttcgccggctttccccgtcaagctctaaatcgggggctccctttagggttccgatttagtgctttacggcacctcgaccccaaaaaacttgattagggtgatggttcacgtagtgggccatcgccctgatagacggtttttcgccctttgacgttggagtccacgttctttaatagtggactcttgttccaaactggaacaacactcaaccctatctcggtctattcttttgatttataagggattttgccgatttcggcctattggttaaaaaatgagctgatttaacaaaaatttaacgcgaattaattctgtggaatgtgtgtcagttagggtgtggaaagtccccaggctccccagcaggcagaagtatgcaaagcatgcatctcaattagtcagcaaccaggtgtggaaagtccccaggctccccagcaggcagaagtatgcaaagcatgcatctcaattagtcagcaaccatagtcccgcccctaactccgcccatcccgcccctaactccgcccagttccgcccattctccgccccatggctgactaattttttttatttatgcagaggccgaggccgcctctgcctctgagctattccagaagtagtgaggaggcttttttggaggcctaggcttttgcaaaaagctcccgggagcttgtatatccattttcggatctgatcaagagacaggatgaggatcgtttcgcatgattgaacaagatggattgcacgcaggttctccggccgcttgggtggagaggctattcggctatgactgggcacaacagacaatcggctgctctgatgccgccgtgttccggctgtcagcgcaggggcgcccggttctttttgtcaagaccgacctgtccggtgccctgaatgaactgcaggacgaggcagcgcggctatcgtggctggccacgacgggcgttccttgcgcagctgtgctcgacgttgtcactgaagcgggaagggactggctgctattgggcgaagtgccggggcaggatctcctgtcatctcaccttgctcctgccgagaaagtatccatcatggctgatgcaatgcggcggctgcatacgcttgatccggctacctgcccattcgaccaccaagcgaaacatcgcatcgagcgagcacgtactcggatggaagccggtcttgtcgatcaggatgatctggacgaagagcatcaggggctcgcgccagccgaactgttcgccaggctcaaggcgcgcatgcccgacggcgaggatctcgtcgtgacccatggcgatgcctgcttgccgaatatcatggtggaaaatggccgcttttctggattcatcgactgtggccggctgggtgtggcggaccgctatcaggacatagcgttggctacccgtgatattgctgaagagcttggcggcgaatgggctgaccgcttcctcgtgctttacggtatcgccgctcccgattcgcagcgcatcgccttctatcgccttcttgacgagttcttctgagcgggactctggggttcgaaatgaccgaccaagcgacgcccaacctgccatcacgagatttcgattccaccgccgccttctatgaaaggttgggcttcggaatcgttttccgggacgccggctggatgatcctccagcgcggggatctcatgctggagttcttcgcccaccccaacttgtttattgcagcttataatggttacaaataaagcaatagcatcacaaatttcacaaataaagcatttttttcactgcattctagttgtggtttgtccaaactcatcaatgtatcttatcatgtctgtataccgtcgacctctagctagagcttggcgtaatcatggtcatagctgtttcctgtgtgaaattgttatccgctcacaattccacacaacatacgagccggaagcataaagtgtaaagcctggggtgcctaatgagtgagctaactcacattaattgcgttgcgctcactgcccgctttccagtcgggaaacctgtcgtgccagctgcattaatgaatcggccaacgcgcggggagaggcggtttgcgtattgggcgctcttccgcttcctcgctcactgactcgctgcgctcggtcgttcggctgcggcgagcggtatcagctcactcaaaggcggtaatacggttatccacagaatcaggggataacgcaggaaagaacatgtgagcaaaaggccagcaaaaggccaggaaccgtaaaaaggccgcgttgctggcgtttttccataggctccgcccccctgacgagcatcacaaaaatcgacgctcaagtcagaggtggcgaaacccgacaggactataaagataccaggcgtttccccctggaagctccctcgtgcgctctcctgttccgaccctgccgcttaccggatacctgtccgcctttctcccttcgggaagcgtggcgctttctcatagctcacgctgtaggtatctcagttcggtgtaggtcgttcgctccaagctgggctgtgtgcacgaaccccccgttcagcccgaccgctgcgccttatccggtaactatcgtcttgagtccaacccggtaagacacgacttatcgccactggcagcagccactggtaacaggattagcagagcgaggtatgtaggcggtgctacagagttcttgaagtggtggcctaactacggctacactagaagaacagtatttggtatctgcgctctgctgaagccagttaccttcggaaaaagagttggtagctcttgatccggcaaacaaaccaccgctggtagcggtttttttgtttgcaagcagcagattacgcgcagaaaaaaaggatctcaagaagatcctttgatcttttctacggggtctgacgctcagtggaacgaaaactcacgttaagggattttggtcatgagattatcaaaaaggatcttcacctagatccttttaaattaaaaatgaagttttaaatcaatctaaagtatatatgagtaaacttggtctgacagttaccaatgcttaatcagtgaggcacctatctcagcgatctgtctatttcgttcatccatagttgcctgactccccgtcgtgtagataactacgatacgggagggcttaccatctggccccagtgctgcaatgataccgcgagacccacgctcaccggctccagatttatcagcaataaaccagccagccggaagggccgagcgcagaagtggtcctgcaactttatccgcctccatccagtctattaattgttgccgggaagctagagtaagtagttcgccagttaatagtttgcgcaacgttgttgccattgctacaggcatcgtggtgtcacgctcgtcgtttggtatggcttcattcagctccggttcccaacgatcaaggcgagttacatgatcccccatgttgtgcaaaaaagcggttagctccttcggtcctccgatcgttgtcagaagtaagttggccgcagtgttatcactcatggttatggcagcactgcataattctcttactgtcatgccatccgtaagatgcttttctgtgactggtgagtactcaaccaagtcattctgagaatagtgtatgcggcgaccgagttgctcttgcccggcgtcaatacgggataataccgcgccacatagcagaactttaaaagtgctcatcattggaaaacgttcttcggggcgaaaactctcaaggatcttaccgctgttgagatccagttcgatgtaacccactcgtgcacccaactgatcttcagcatcttttactttcaccagcgtttctgggtgagcaaaaacaggaaggcaaaatgccgcaaaaaagggaataagggcgacacggaaatgttgaatactcatactcttcctttttcaatattattgaagcatttatcagggttattgtctcatgagcggatacatatttgaatgtatttagaaaaataaacaaataggggttccgcgcacatttccccgaaaagtgccacctgacgtc

SEQ ID NO: 195 - DNA, 4798 bp, Artificial Sequence
  Synthetic
ttgcccggcgtcaatacgggataataccgcgccacatagcagaactttaaaagtgctcatcattggaaaacgttcttcggggcgaaaactctcaaggatcttaccgctgttgagatccagttcgatgtaacccactcgtgcacccaactgatcttcagcatcttttactttcaccagcgtttctgggtgagcaaaaacaggaaggcaaaatgccgcaaaaaagggaataagggcgacacggaaatgttgaatactcatactcttcctttttcattattattgaagcatttatcagggttattgtctcatgagcggatacatatttgaatgtatttagaaaaataaacaaataggggttccgcgcacatttccccgaaaagtgccacctgacgtcgacggatcgggagatctcccgatcccctatggtcgactctcagtacaatctgctctgatgccgcatagttaagccagtatctgctccctgcttgtgtgttggaggtcgctgagtagtgcgcgagcaaaatttaagctacaacaaggcaaggcttgaccgacaattgcatgaagaatctgcttagggttaggcgttttgcgctgcttcgcgatgtacgggccagatatacgcgagggcctatttcccatgattccttcatatttgcatatacgatacaaggctgttagagagataattagaattaatttgactgtaaacacaaagatattagtacaaaatacgtgacgtagaaagtaataatttcttgggtagtttgcagttttaaaattatgttttaaaatggactatcatatgcttaccgtaacttgaaagtatttcgatttcttggctttatatatcttgtggaaaggacgaaacaccgtaatacgactcactatagggtctagaattcctgtgaactgccgaataggcagctgaaaatgcgaggtattcggctccgcgacggaggctaagaaaaactgccgaaaaggcagaaaaacctgtagcggccgctttttttcttctgaggcggaaagaaccagctggggctctagggggtatccccacgcgccctgtagcggcgcattaagcgcggcgggtgtggtggttacgcgcagcgtgaccgctacacttgccagcgccctagcgcccgctcctttcgctttcttcccttcctttctcgccacgttcgccggctttccccgtcaagctctaaatcgggggctccctttagggttccgatttagtgctttacggcacctcgaccccaaaaaacttgattagggtgatggttcacgtagtgggccatcgccctgatagacggtttttcgccctttgacgttggagtccacgttctttaatagtggactcttgttccaaactggaacaacactcaaccctatctcggtctattcttttgatttataagggattttgccgatttcggcctattggttaaaaaatgagctgatttaacaaaaatttaacgcgaattaattctgtggaatgtgtgtcagttagggtgtggaaagtccccaggctccccagcaggcagaagtatgcaaagcatgcatctcaattagtcagcaaccaggtgtggaaagtccccaggctccccagcaggcagaagtatgcaaagcatgcatctcaattagtcagcaaccatagtcccgcccctaactccgcccatcccgcccctaactccgcccagttccgcccattctccgccccatggctgactaattttttttatttatgcagaggccgaggccgcctctgcctctgagctattccagaagtagtgaggaggcttttttggaggcctaggcttttgcaaaaagctcccgggagcttgtatatccattttcggatctgatcaagagacaggatgaggatcgtttcgcatgattgaacaagatggattgcacgcaggttctccggccgcttgggtggagaggctattcggctatgactgggcacaacagacaatcggctgctctgatgccgccgtgttccggctgtcagcgcaggggcgcccggttctttttgtcaagaccgacctgtccggtgccctgaatgaactgcaggacgaggcagcgcggctatcgtggctggccacgacgggcgttccttgcgcagctgtgctcgacgttgtcactgaagcgggaagggactggctgctattgggcgaagtgccggggcaggatctcctgtcatctcaccttgctcctgccgagaaagtatccatcatggctgatgcaatgcggcggctgcatacgcttgatccggctacctgcccattcgaccaccaagcgaaacatcgcatcgagcgagcacgtactcggatggaagccggtcttgtcgatcaggatgatctggacgaagagcatcaggggctcgcgccagccgaactgttcgccaggctcaaggcgcgcatgcccgacggcgaggatctcgtcgtgacccatggcgatgcctgcttgccgaatatcatggtggaaaatggccgcttttctggattcatcgactgtggccggctgggtgtggcggaccgctatcaggacatagcgttggctacccgtgatattgctgaagagcttggcggcgaatgggctgaccgcttcctcgtgctttacggtatcgccgctcccgattcgcagcgcatcgccttctatcgccttcttgacgagttcttctgagcgggactctggggttcgaaatgaccgaccaagcgacgcccaacctgccatcacgagatttcgattccaccgccgccttctatgaaaggttgggcttcggaatcgttttccgggacgccggctggatgatcctccagcgcggggatctcatgctggagttcttcgcccaccccaacttgtttattgcagcttataatggttacaaataaagcaatagcatcacaaatttcacaaataaagcatttttttcactgcattctagttgtggtttgtccaaactcatcaatgtatcttatcatgtctgtataccgtcgacctctagctagagcttggcgtaatcatggtcatagctgtttcctgtgtgaaattgttatccgctcacaattccacacaacatacgagccggaagcataaagtgtaaagcctggggtgcctaatgagtgagctaactcacattaattgcgttgcgctcactgcccgctttccagtcgggaaacctgtcgtgccagctgcattaatgaatcggccaacgcgcggggagaggcggtttgcgtattgggcgctcttccgcttcctcgctcactgactcgctgcgctcggtcgttcggctgcggcgagcggtatcagctcactcaaaggcggtaatacggttatccacagaatcaggggataacgcaggaaagaacatgtgagcaaaaggccagcaaaaggccaggaaccgtaaaaaggccgcgttgctggcgtttttccataggctccgcccccctgacgagcatcacaaaaatcgacgctcaagtcagaggtggcgaaacccgacaggactataaagataccaggcgtttccccctggaagctccctcgtgcgctctcctgttccgaccctgccgcttaccggatacctgtccgcctttctcccttcgggaagcgtggcgctttctcaatgctcacgctgtaggtatctcagttcggtgtaggtcgttcgctccaagctgggctgtgtgcacgaaccccccgttcagcccgaccgctgcgccttatccggtaactatcgtcttgagtccaacccggtaagacacgacttatcgccactggcagcagccactggtaacaggattagcagagcgaggtatgtaggcggtgctacagagttcttgaagtggtggcctaactacggctacactagaaggacagtatttggtatctgcgctctgctgaagccagttaccttcggaaaaagagttggtagctcttgatccggcaaacaaaccaccgctggtagcggtggtttttttgtttgcaagcagcagattacgcgcagaaaaaaaggatctcaagaagatcctttgatcttttctacggggtctgacgctcagtggaacgaaaactcacgttaagggattttggtcatgagattatcaaaaaggatcttcacctagatccttttaaattaaaaatgaagttttaaatcaatctaaagtatatatgagtaaacttggtctgacagttaccaatgcttaatcagtgaggcacctatctcagcgatctgtctatttcgttcatccatagttgcctgactccccgtcgtgtagataactacgatacgggagggcttaccatctggccccagtgctgcaatgataccgcgagacccacgctcaccggctccagatttatcagcaataaaccagccagccggaagggccgagcgcagaagtggtcctgcaactttatccgcctccatccagtctattaattgttgccgggaagctagagtaagtagttcgccagttaatagtttgcgcaacgttgttgccattgctacaggcatcgtggtgtcacgctcgtcgtttggtatggcttcattcagctccggttcccaacgatcaaggcgagttacatgatcccccatgttgtgcaaaaaagcggttagctccttcggtcctccgatcgttgtcagaagtaagttggccgcagtgttatcactcatggttatggcagcactgcataattctcttactgtcatgccatccgtaagatgcttttctgtgactggtgagtactcaaccaagtcattctgagaatagtgtatgcggcgaccgagttgctc

SEQ ID NO: 196 - DNA, 4798 bp, Artificial Sequence
  Synthetic
ttgcccggcgtcaatacgggataataccgcgccacatagcagaactttaaaagtgctcatcattggaaaacgttcttcggggcgaaaactctcaaggatcttaccgctgttgagatccagttcgatgtaacccactcgtgcacccaactgatcttcagcatcttttactttcaccagcgtttctgggtgagcaaaaacaggaaggcaaaatgccgcaaaaaagggaataagggcgacacggaaatgttgaatactcatactcttcctttttcattattattgaagcatttatcagggttattgtctcatgagcggatacatatttgaatgtatttagaaaaataaacaaataggggttccgcgcacatttccccgaaaagtgccacctgacgtcgacggatcgggagatctcccgatcccctatggtcgactctcagtacaatctgctctgatgccgcatagttaagccagtatctgctccctgcttgtgtgttggaggtcgctgagtagtgcgcgagcaaaatttaagctacaacaaggcaaggcttgaccgacaattgcatgaagaatctgcttagggttaggcgttttgcgctgcttcgcgatgtacgggccagatatacgcgagggcctatttcccatgattccttcatatttgcatatacgatacaaggctgttagagagataattagaattaatttgactgtaaacacaaagatattagtacaaaatacgtgacgtagaaagtaataatttcttgggtagtttgcagttttaaaattatgttttaaaatggactatcatatgcttaccgtaacttgaaagtatttcgatttcttggctttatatatcttgtggaaaggacgaaacaccgtaatacgactcactatagggtctagaattcctgtgaactgccgaataggcagctgaaaataatgcaggcaaatcaaccttagtctgaaggccaaaaactgccgaaaaggcagaaaaacctgtagcggccgctttttttcttctgaggcggaaagaaccagctggggctctagggggtatccccacgcgccctgtagcggcgcattaagcgcggcgggtgtggtggttacgcgcagcgtgaccgctacacttgccagcgccctagcgcccgctcctttcgctttcttcccttcctttctcgccacgttcgccggctttccccgtcaagctctaaatcgggggctccctttagggttccgatttagtgctttacggcacctcgaccccaaaaaacttgattagggtgatggttcacgtagtgggccatcgccctgatagacggtttttcgccctttgacgttggagtccacgttctttaatagtggactcttgttccaaactggaacaacactcaaccctatctcggtctattcttttgatttataagggattttgccgatttcggcctattggttaaaaaatgagctgatttaacaaaaatttaacgcgaattaattctgtggaatgtgtgtcagttagggtgtggaaagtccccaggctccccagcaggcagaagtatgcaaagcatgcatctcaattagtcagcaaccaggtgtggaaagtccccaggctccccagcaggcagaagtatgcaaagcatgcatctcaattagtcagcaaccatagtcccgcccctaactccgcccatcccgcccctaactccgcccagttccgcccattctccgccccatggctgactaattttttttatttatgcagaggccgaggccgcctctgcctctgagctattccagaagtagtgaggaggcttttttggaggcctaggcttttgcaaaaagctcccgggagcttgtatatccattttcggatctgatcaagagacaggatgaggatcgtttcgcatgattgaacaagatggattgcacgcaggttctccggccgcttgggtggagaggctattcggctatgactgggcacaacagacaatcggctgctctgatgccgccgtgttccggctgtcagcgcaggggcgcccggttctttttgtcaagaccgacctgtccggtgccctgaatgaactgcaggacgaggcagcgcggctatcgtggctggccacgacgggcgttccttgcgcagctgtgctcgacgttgtcactgaagcgggaagggactggctgctattgggcgaagtgccggggcaggatctcctgtcatctcaccttgctcctgccgagaaagtatccatcatggctgatgcaatgcggcggctgcatacgcttgatccggctacctgcccattcgaccaccaagcgaaacatcgcatcgagcgagcacgtactcggatggaagccggtcttgtcgatcaggatgatctggacgaagagcatcaggggctcgcgccagccgaactgttcgccaggctcaaggcgcgcatgcccgacggcgaggatctcgtcgtgacccatggcgatgcctgcttgccgaatatcatggtggaaaatggccgcttttctggattcatcgactgtggccggctgggtgtggcggaccgctatcaggacatagcgttggctacccgtgatattgctgaagagcttggcggcgaatgggctgaccgcttcctcgtgctttacggtatcgccgctcccgattcgcagcgcatcgccttctatcgccttcttgacgagttcttctgagcgggactctggggttcgaaatgaccgaccaagcgacgcccaacctgccatcacgagatttcgattccaccgccgccttctatgaaaggttgggcttcggaatcgttttccgggacgccggctggatgatcctccagcgcggggatctcatgctggagttcttcgcccaccccaacttgtttattgcagcttataatggttacaaataaagcaatagcatcacaaatttcacaaataaagcatttttttcactgcattctagttgtggtttgtccaaactcatcaatgtatcttatcatgtctgtataccgtcgacctctagctagagcttggcgtaatcatggtcatagctgtttcctgtgtgaaattgttatccgctcacaattccacacaacatacgagccggaagcataaagtgtaaagcctggggtgcctaatgagtgagctaactcacattaattgcgttgcgctcactgcccgctttccagtcgggaaacctgtcgtgccagctgcattaatgaatcggccaacgcgcggggagaggcggtttgcgtattgggcgctcttccgcttcctcgctcactgactcgctgcgctcggtcgttcggctgcggcgagcggtatcagctcactcaaaggcggtaatacggttatccacagaatcaggggataacgcaggaaagaacatgtgagcaaaaggccagcaaaaggccaggaaccgtaaaaaggccgcgttgctggcgtttttccataggctccgcccccctgacgagcatcacaaaaatcgacgctcaagtcagaggtggcgaaacccgacaggactataaagataccaggcgtttccccctggaagctccctcgtgcgctctcctgttccgaccctgccgcttaccggatacctgtccgcctttctcccttcgggaagcgtggcgctttctcaatgctcacgctgtaggtatctcagttcggtgtaggtcgttcgctccaagctgggctgtgtgcacgaaccccccgttcagcccgaccgctgcgccttatccggtaactatcgtcttgagtccaacccggtaagacacgacttatcgccactggcagcagccactggtaacaggattagcagagcgaggtatgtaggcggtgctacagagttcttgaagtggtggcctaactacggctacactagaaggacagtatttggtatctgcgctctgctgaagccagttaccttcggaaaaagagttggtagctcttgatccggcaaacaaaccaccgctggtagcggtggtttttttgtttgcaagcagcagattacgcgcagaaaaaaaggatctcaagaagatcctttgatcttttctacggggtctgacgctcagtggaacgaaaactcacgttaagggattttggtcatgagattatcaaaaaggatcttcacctagatccttttaaattaaaaatgaagttttaaatcaatctaaagtatatatgagtaaacttggtctgacagttaccaatgcttaatcagtgaggcacctatctcagcgatctgtctatttcgttcatccatagttgcctgactccccgtcgtgtagataactacgatacgggagggcttaccatctggccccagtgctgcaatgataccgcgagacccacgctcaccggctccagatttatcagcaataaaccagccagccggaagggccgagcgcagaagtggtcctgcaactttatccgcctccatccagtctattaattgttgccgggaagctagagtaagtagttcgccagttaatagtttgcgcaacgttgttgccattgctacaggcatcgtggtgtcacgctcgtcgtttggtatggcttcattcagctccggttcccaacgatcaaggcgagttacatgatcccccatgttgtgcaaaaaagcggttagctccttcggtcctccgatcgttgtcagaagtaagttggccgcagtgttatcactcatggttatggcagcactgcataattctcttactgtcatgccatccgtaagatgcttttctgtgactggtgagtactcaaccaagtcattctgagaatagtgtatgcggcgaccgagttgctc

SEQ ID NO: 197 - DNA, 6648 bp, Artificial Sequence
  Synthetic
gacggatcgggagatctcccgatcccctatggtgcactctcagtacaatctgctctgatgccgcatagttaagccagtatctgctccctgcttgtgtgttggaggtcgctgagtagtgcgcgagcaaaatttaagctacaacaaggcaaggcttgaccgacaattgcatgaagaatctgcttagggttaggcgttttgcgctgcttcgcgatgtacgggccagatatacgcgttgacattgattattgactagttattaatagtaatcaattacggggtcattagttcatagcccatatatggagttccgcgttacataacttacggtaaatggcccgcctggctgaccgcccaacgacccccgcccattgacgtcaataatgacgtatgttcccatagtaacgccaatagggactttccattgacgtcaatgggtggagtatttacggtaaactgcccacttggcagtacatcaagtgtatcatatgccaagtacgccccctattgacgtcaatgacggtaaatggcccgcctggcattatgcccagtacatgaccttatgggactttcctacttggcagtacatctacgtattagtcatcgctattaccatggtgatgcggttttggcagtacatcaatgggcgtggatagcggtttgactcacggggatttccaagtctccaccccattgacgtcaatgggagtttgttttggcaccaaaatcaacgggactttccaaaatgtcgtaacaactccgccccattgacgcaaatgggcggtaggcgtgtacggtgggaggtctatataagcagagctctctggctaactagagaacccactgcttactggcttatcgaaattaatacgactcactatagggagacccaagctggctagcgtttaaacttaagcttggtaccgagctcggccaccatgggcaacaccctgacagcccaccagatggagcagctgggccggttcaatgactgctttgtgatgcaccctcaggccaaagtgatcttcaacgattttgacgatctgcgcctgaaccggaatttccagtccgaccagcagtgtatgctgctgaccggcgatacaggcgtgggcaagagccacctgatcaacaattacaagaagagagtgctggcctcccagacctattccaggacatctatgccagtgctggtgacccgcatcagctcccacaagggcctggacgccaccctgcggcagatgctgaccgacctggagagcttcggcagccagcagagaaagggccagaattacaagatcgacctgaagacacagctggtgaagaacctggtgcgggccaatgtggagctgctgatcttcaatgagtttcaggagctgatcgagttcaagaccccaaaggagaggcagacaatcgccaacgagctgaagtttatctctgaggaggcccgcgtgcctatcgtgctggtgggcatgccatggaccgagcagatcgccgaggagccccagtggtctagcaggctgatccggcggcggaagctggagtacttcagcctgcagaaggattccaagtactatcgccagtatctgatcggcctggccaagcacatgcccttcgacgagccccctaagatcgaggataagcacatcgccatccctctgtttgcagcatgcagaggagagtccagggtgctgaaccacctgctgtctgagaccctgaagctggtcatggtgaatggcgaccgctctctggatatccggcacctggcccagacatacagaaagctgtatgagtctcaggagagcgaggccgccagcgtgttctttaacccattcctggagcccctggacaaggtgctgatctctgaggtggtgaagcctagccggtataacccaaatgccatgacccccgatgagatgctgatcaagagagagttttccgccccttctacactggcccagctgctgagcaagggctccggaaaacggacagccgacggaagcgagttcgagtcaccgaaaaagaagcgaaaagttggtggtagtggtggaagcggcgaggccagcggttccggacgggctgacgcattggacgattttgatctggatatgctgggaagtgacgccctcgatgattttgaccttgacatgcttggttcggatgcccttgatgactttgacctcgacatgctcggcagtgacgcccttgatgatttcgacctggacatgctgattaactctagatgagcggccgctcgagtctagagggcccgtttaaacccgctgatcagcctcgacgtgccttccttgaccctggaaggtgccactcccactgtcctttcctaataaaatgaggaaattgcatcgcattgtctgagtaggtgtcattctattctggggggtggggtggggcaggacagcaagggggaggattgggaagacaatagcaggcatgctggggatgcggtgggctctatggcttctgaggcggaaagaaccagctggggctctagggggtatccccacgcgccctgtagcggcgcattaagcgcggcgggtgtggtggttacgcgcagcgtgaccgctacacttgccagcgccctagcgcccgctcctttcgctttcttcccttcctttctcgccacgttcgccggctttccccgtcaagctctaaatcgggggctccctttagggttccgatttagtgctttacggcacctcgaccccaaaaaacttgattagggtgatggttcacgtagtgggccatcgccctgatagacggtttttcgccctttgacgttggagtccacgttctttaatagtggactcttgttccaaactggaacaacactcaaccctatctcggtctattcttttgatttataagggattttgccgatttcggcctattggttaaaaaatgagctgatttaacaaaaatttaacgcgaattaattctgtggaatgtgtgtcagttagggtgtggaaagtccccaggctccccagcaggcagaagtatgcaaagcatgcatctcaattagtcagcaaccaggtgtggaaagtccccaggctccccagcaggcagaagtatgcaaagcatgcatctcaattagtcagcaaccatagtcccgcccctaactccgcccatcccgcccctaactccgcccagttccgcccattctccgccccatggctgactaattttttttatttatgcagaggccgaggccgcctctgcctctgagctattccagaagtagtgaggaggcttttttggaggcctaggcttttgcaaaaagctcccgggagcttgtatatccattttcggatctgatcaagagacaggatgaggatcgtttcgcatgattgaacaagatggattgcacgcaggttctccggccgcttgggtggagaggctattcggctatgactgggcacaacagacaatcggctgctctgatgccgccgtgttccggctgtcagcgcaggggcgcccggttctttttgtcaagaccgacctgtccggtgccctgaatgaactgcaggacgaggcagcgcggctatcgtggctggccacgacgggcgttccttgcgcagctgtgctcgacgttgtcactgaagcgggaagggactggctgctattgggcgaagtgccggggcaggatctcctgtcatctcaccttgctcctgccgagaaagtatccatcatggctgatgcaatgcggcggctgcatacgcttgatccggctacctgcccattcgaccaccaagcgaaacatcgcatcgagcgagcacgtactcggatggaagccggtcttgtcgatcaggatgatctggacgaagagcatcaggggctcgcgccagccgaactgttcgccaggctcaaggcgcgcatgcccgacggcgaggatctcgtcgtgacccatggcgatgcctgcttgccgaatatcatggtggaaaatggccgcttttctggattcatcgactgtggccggctgggtgtggcggaccgctatcaggacatagcgttggctacccgtgatattgctgaagagcttggcggcgaatgggctgaccgcttcctcgtgctttacggtatcgccgctcccgattcgcagcgcatcgccttctatcgccttcttgacgagttcttctgagcgggactctggggttcgaaatgaccgaccaagcgacgcccaacctgccatcacgagatttcgattccaccgccgccttctatgaaaggttgggcttcggaatcgttttccgggacgccggctggatgatcctccagcgcggggatctcatgctggagttcttcgcccaccccaacttgtttattgcagcttataatggttacaaataaagcaatagcatcacaaatttcacaaataaagcatttttttcactgcattctagttgtggtttgtccaaactcatcaatgtatcttatcatgtctgtataccgtcgacctctagctagagcttggcgtaatcatggtcatagctgtttcctgtgtgaaattgttatccgctcacaattccacacaacatacgagccggaagcataaagtgtaaagcctggggtgcctaatgagtgagctaactcacattaattgcgttgcgctcactgcccgctttccagtcgggaaacctgtcgtgccagctgcattaatgaatcggccaacgcgcggggagaggcggtttgcgtattgggcgctcttccgcttcctcgctcactgactcgctgcgctcggtcgttcggctgcggcgagcggtatcagctcactcaaaggcggtaatacggttatccacagaatcaggggataacgcaggaaagaacatgtgagcaaaaggccagcaaaaggccaggaaccgtaaaaaggccgcgttgctggcgtttttccataggctccgcccccctgacgagcatcacaaaaatcgacgctcaagtcagaggtggcgaaacccgacaggactataaagataccaggcgtttccccctggaagctccctcgtgcgctctcctgttccgaccctgccgcttaccggatacctgtccgcctttctcccttcgggaagcgtggcgctttctcatagctcacgctgtaggtatctcagttcggtgtaggtcgttcgctccaagctgggctgtgtgcacgaaccccccgttcagcccgaccgctgcgccttatccggtaactatcgtcttgagtccaacccggtaagacacgacttatcgccactggcagcagccactggtaacaggattagcagagcgaggtatgtaggcggtgctacagagttcttgaagtggtggcctaactacggctacactagaagaacagtatttggtatctgcgctctgctgaagccagttaccttcggaaaaagagttggtagctcttgatccggcaaacaaaccaccgctggtagcggtttttttgtttgcaagcagcagattacgcgcagaaaaaaaggatctcaagaagatcctttgatcttttctacggggtctgacgctcagtggaacgaaaactcacgttaagggattttggtcatgagattatcaaaaaggatcttcacctagatccttttaaattaaaaatgaagttttaaatcaatctaaagtatatatgagtaaacttggtctgacagttaccaatgcttaatcagtgaggcacctatctcagcgatctgtctatttcgttcatccatagttgcctgactccccgtcgtgtagataactacgatacgggagggcttaccatctggccccagtgctgcaatgataccgcgagacccacgctcaccggctccagatttatcagcaataaaccagccagccggaagggccgagcgcagaagtggtcctgcaactttatccgcctccatccagtctattaattgttgccgggaagctagagtaagtagttcgccagttaatagtttgcgcaacgttgttgccattgctacaggcatcgtggtgtcacgctcgtcgtttggtatggcttcattcagctccggttcccaacgatcaaggcgagttacatgatcccccatgttgtgcaaaaaagcggttagctccttcggtcctccgatcgttgtcagaagtaagttggccgcagtgttatcactcatggttatggcagcactgcataattctcttactgtcatgccatccgtaagatgcttttctgtgactggtgagtactcaaccaagtcattctgagaatagtgtatgcggcgaccgagttgctcttgcccggcgtcaatacgggataataccgcgccacatagcagaactttaaaagtgctcatcattggaaaacgttcttcggggcgaaaactctcaaggatcttaccgctgttgagatccagttcgatgtaacccactcgtgcacccaactgatcttcagcatcttttactttcaccagcgtttctgggtgagcaaaaacaggaaggcaaaatgccgcaaaaaagggaataagggcgacacggaaatgttgaatactcatactcttcctttttcaatattattgaagcatttatcagggttattgtctcatgagcggatacatatttgaatgtatttagaaaaataaacaaataggggttccgcgcacatttccccgaaaagtgccacctgacgtc

SEQ ID NO: 198 - DNA, 6672 bp, Artificial Sequence
  Synthetic
gacggatcgggagatctcccgatcccctatggtgcactctcagtacaatctgctctgatgccgcatagttaagccagtatctgctccctgcttgtgtgttggaggtcgctgagtagtgcgcgagcaaaatttaagctacaacaaggcaaggcttgaccgacaattgcatgaagaatctgcttagggttaggcgttttgcgctgcttcgcgatgtacgggccagatatacgcgttgacattgattattgactagttattaatagtaatcaattacggggtcattagttcatagcccatatatggagttccgcgttacataacttacggtaaatggcccgcctggctgaccgcccaacgacccccgcccattgacgtcaataatgacgtatgttcccatagtaacgccaatagggactttccattgacgtcaatgggtggagtatttacggtaaactgcccacttggcagtacatcaagtgtatcatatgccaagtacgccccctattgacgtcaatgacggtaaatggcccgcctggcattatgcccagtacatgaccttatgggactttcctacttggcagtacatctacgtattagtcatcgctattaccatggtgatgcggttttggcagtacatcaatgggcgtggatagcggtttgactcacggggatttccaagtctccaccccattgacgtcaatgggagtttgttttggcaccaaaatcaacgggactttccaaaatgtcgtaacaactccgccccattgacgcaaatgggcggtaggcgtgtacggtgggaggtctatataagcagagctctctggctaactagagaacccactgcttactggcttatcgaaattaatacgactcactatagggagacccaagctggctagcgtttaaacttaagcttggtaccgagctcggatccgccaccatgggcaaacggacagccgacggaagcgagttcgagtcaccgaaaaagaagcgaaaagttggctccggaatgaagaccgacatccagcactactccgatgagtctctggagagcttcctgctgaggctgtcccaggagcagggctatgagcggttcagccactttgccgaggacatctggttcgatacaatggagcagcacgaggcaatcgcaggagcatttccactggagctgaaccggatcaatatctaccacgcccagaccacaagccagatgcgggtgagagtgctgatccacctggagaaccagctgaagctgaacaatttcggcgtgctgagactggccctgagccactccaaggcccagtttagccctgagtacaaggcagtgcacaggctgggctccgactatccattcgtgtttctgggcaagagattcacccccatctgccctctgtgcatctctgaggccccatacatcaggcagcagtggcagtttctgagccagcaggcctgcgagaggcacggctgtaagctggtgcaccactgccccgagtgtcagtccaggctggagtatcagaccacagagtctatcagccagtgcgagtgtggcttcgagctgcggaactctccagtggaggacgcaccagtggccgccctgctggtggcaagatggctgtctggcaatgatagcaagcctctgggcctgctgaaggccgagatgaccctgagcgagaggtacggctttctgctgtggtacgtgaaccgctatggcgacatcgagaatatctccttcgagtcttttgtggagtattgctcctgttggcccagggtgctgaaggaggagctggatgagctggtgaacaaggccgacctgatccgcatcaaggattggaagaagacattctttaatgaggtgttcggcgccctgctgaaggactgcaggcagctgcccagccggcagctggagtgtaacagcgtgctgacccaggtgctggcctactttacaaagctgatggccgccatccccagctcctctaagggcaatgtgggcgacgtgctgctgagccctctggaggcctccaccctgctgtcttgcaccacagatgaggtgtaccggctgtatgagttcggcgagatcaaggccgccatcaggcctcgcatgcacaccaagatcgccagccacgagtccgcctttacactgcggtccgtgatcgagaccaagctgacaagaatgtgcagcgagaatgatggcctgtccgtgtatctgccagagtggtgagcggccgctcgagtctagagggcccgtttaaacccgctgatcagcctcgactgtgccttctagttgccagccatctgttgtttgcccctcccccgtgccttccttgaccctggaaggtgccactcccactgtcctttcctaataaaatgaggaaattgcatcgcattgtctgagtaggtgtcattctattctggggggtggggtggggcaggacagcaagggggaggattgggaagacaatagcaggcatgctggggatgcggtgggctctatggcttctgaggcggaaagaaccagctggggctctagggggtatccccacgcgccctgtagcggcgcattaagcgcggcgggtgtggtggttacgcgcagcgtgaccgctacacttgccagcgccctagcgcccgctcctttcgctttcttcccttcctttctcgccacgttcgccggctttccccgtcaagctctaaatcgggggctccctttagggttccgatttagtgctttacggcacctcgaccccaaaaaacttgattagggtgatggttcacgtagtgggccatcgccctgatagacggtttttcgccctttgacgttggagtccacgttctttaatagtggactcttgttccaaactggaacaacactcaaccctatctcggtctattcttttgatttataagggattttgccgatttcggcctattggttaaaaaatgagctgatttaacaaaaatttaacgcgaattaattctgtggaatgtgtgtcagttagggtgtggaaagtccccaggctccccagcaggcagaagtatgcaaagcatgcatctcaattagtcagcaaccaggtgtggaaagtccccaggctccccagcaggcagaagtatgcaaagcatgcatctcaattagtcagcaaccatagtcccgcccctaactccgcccatcccgcccctaactccgcccagttccgcccattctccgccccatggctgactaattttttttatttatgcagaggccgaggccgcctctgcctctgagctattccagaagtagtgaggaggcttttttggaggcctaggcttttgcaaaaagctcccgggagcttgtatatccattttcggatctgatcaagagacaggatgaggatcgtttcgcatgattgaacaagatggattgcacgcaggttctccggccgcttgggtggagaggctattcggctatgactgggcacaacagacaatcggctgctctgatgccgccgtgttccggctgtcagcgcaggggcgcccggttctttttgtcaagaccgacctgtccggtgccctgaatgaactgcaggacgaggcagcgcggctatcgtggctggccacgacgggcgttccttgcgcagctgtgctcgacgttgtcactgaagcgggaagggactggctgctattgggcgaagtgccggggcaggatctcctgtcatctcaccttgctcctgccgagaaagtatccatcatggctgatgcaatgcggcggctgcatacgcttgatccggctacctgcccattcgaccaccaagcgaaacatcgcatcgagcgagcacgtactcggatggaagccggtcttgtcgatcaggatgatctggacgaagagcatcaggggctcgcgccagccgaactgttcgccaggctcaaggcgcgcatgcccgacggcgaggatctcgtcgtgacccatggcgatgcctgcttgccgaatatcatggtggaaaatggccgcttttctggattcatcgactgtggccggctgggtgtggcggaccgctatcaggacatagcgttggctacccgtgatattgctgaagagcttggcggcgaatgggctgaccgcttcctcgtgctttacggtatcgccgctcccgattcgcagcgcatcgccttctatcgccttcttgacgagttcttctgagcgggactctggggttcgaaatgaccgaccaagcgacgcccaacctgccatcacgagatttcgattccaccgccgccttctatgaaaggttgggcttcggaatcgttttccgggacgccggctggatgatcctccagcgcggggatctcatgctggagttcttcgcccaccccaacttgtttattgcagcttataatggttacaaataaagcaatagcatcacaaatttcacaaataaagcatttttttcactgcattctagttgtggtttgtccaaactcatcaatgtatcttatcatgtctgtataccgtcgacctctagctagagcttggcgtaatcatggtcatagctgtttcctgtgtgaaattgttatccgctcacaattccacacaacatacgagccggaagcataaagtgtaaagcctggggtgcctaatgagtgagctaactcacattaattgcgttgcgctcactgcccgctttccagtcgggaaacctgtcgtgccagctgcattaatgaatcggccaacgcgcggggagaggcggtttgcgtattgggcgctcttccgcttcctcgctcactgactcgctgcgctcggtcgttcggctgcggcgagcggtatcagctcactcaaaggcggtaatacggttatccacagaatcaggggataacgcaggaaagaacatgtgagcaaaaggccagcaaaaggccaggaaccgtaaaaaggccgcgttgctggcgtttttccataggctccgcccccctgacgagcatcacaaaaatcgacgctcaagtcagaggtggcgaaacccgacaggactataaagataccaggcgtttccccctggaagctccctcgtgcgctctcctgttccgaccctgccgcttaccggatacctgtccgcctttctcccttcgggaagcgtggcgctttctcatagctcacgctgtaggtatctcagttcggtgtaggtcgttcgctccaagctgggctgtgtgcacgaaccccccgttcagcccgaccgctgcgccttatccggtaactatcgtcttgagtccaacccggtaagacacgacttatcgccactggcagcagccactggtaacaggattagcagagcgaggtatgtaggcggtgctacagagttcttgaagtggtggcctaactacggctacactagaagaacagtatttggtatctgcgctctgctgaagccagttaccttcggaaaaagagttggtagctcttgatccggcaaacaaaccaccgctggtagcggtttttttgtttgcaagcagcagattacgcgcagaaaaaaaggatctcaagaagatcctttgatcttttctacggggtctgacgctcagtggaacgaaaactcacgttaagggattttggtcatgagattatcaaaaaggatcttcacctagatccttttaaattaaaaatgaagttttaaatcaatctaaagtatatatgagtaaacttggtctgacagttaccaatgcttaatcagtgaggcacctatctcagcgatctgtctatttcgttcatccatagttgcctgactccccgtcgtgtagataactacgatacgggagggcttaccatctggccccagtgctgcaatgataccgcgagacccacgctcaccggctccagatttatcagcaataaaccagccagccggaagggccgagcgcagaagtggtcctgcaactttatccgcctccatccagtctattaattgttgccgggaagctagagtaagtagttcgccagttaatagtttgcgcaacgttgttgccattgctacaggcatcgtggtgtcacgctcgtcgtttggtatggcttcattcagctccggttcccaacgatcaaggcgagttacatgatcccccatgttgtgcaaaaaagcggttagctccttcggtcctccgatcgttgtcagaagtaagttggccgcagtgttatcactcatggttatggcagcactgcataattctcttactgtcatgccatccgtaagatgcttttctgtgactggtgagtactcaaccaagtcattctgagaatagtgtatgcggcgaccgagttgctcttgcccggcgtcaatacgggataataccgcgccacatagcagaactttaaaagtgctcatcattggaaaacgttcttcggggcgaaaactctcaaggatcttaccgctgttgagatccagttcgatgtaacccactcgtgcacccaactgatcttcagcatcttttactttcaccagcgtttctgggtgagcaaaaacaggaaggcaaaatgccgcaaaaaagggaataagggcgacacggaaatgttgaatactcatactcttcctttttcaatattattgaagcatttatcagggttattgtctcatgagcggatacatatttgaatgtatttagaaaaataaacaaataggggttccgcgcacatttccccgaaaagtgccacctgacgtc

SEQ ID NO: 199 - DNA, 7548 bp, Artificial Sequence
  Synthetic
gacggatcgggagatctcccgatcccctatggtgcactctcagtacaatctgctctgatgccgcatagttaagccagtatctgctccctgcttgtgtgttggaggtcgctgagtagtgcgcgagcaaaatttaagctacaacaaggcaaggcttgaccgacaattgcatgaagaatctgcttagggttaggcgttttgcgctgcttcgcgatgtacgggccagatatacgcgttgacattgattattgactagttattaatagtaatcaattacggggtcattagttcatagcccatatatggagttccgcgttacataacttacggtaaatggcccgcctggctgaccgcccaacgacccccgcccattgacgtcaataatgacgtatgttcccatagtaacgccaatagggactttccattgacgtcaatgggtggagtatttacggtaaactgcccacttggcagtacatcaagtgtatcatatgccaagtacgccccctattgacgtcaatgacggtaaatggcccgcctggcattatgcccagtacatgaccttatgggactttcctacttggcagtacatctacgtattagtcatcgctattaccatggtgatgcggttttggcagtacatcaatgggcgtggatagcggtttgactcacggggatttccaagtctccaccccattgacgtcaatgggagtttgttttggcaccaaaatcaacgggactttccaaaatgtcgtaacaactccgccccattgacgcaaatgggcggtaggcgtgtacggtgggaggtctatataagcagagctctctggctaactagagaacccactgcttactggcttatcgaaattaatacgactcactatagggagacccaagctggctagcgtttaaacttaagcttggtaccgagctcggatccgccaccatgggcaaacggacagccgacggaagcgagttcgagtcaccgaaaaagaagcgaaaagttggctccggaatgaccaagctgagcgatctgctggccatcgaggacgaggccatcaagcagaccgccctgaagaagatgttcatgccctacacagaggacgtgtgcgtggacggctatgagcaggagaccctgacaatcctgctgaacctgagctcctctcaccaggccgatcggtgttctgattggctggacgtggccagagcccagagatacctgaaggatagagagaacctggacgccagcctggccgagatccagtggttccacacccacaatctgaagtttcctgattgcagggtgaaggaccagaggatcatcgcccgcccactgagcacagccgaggagtttatcagctccgccgtgctggaccagaggctgggatgggcacacaactccgccgtgtatcgccacaccctgtggctgctgaatcccttcaagtggcagtctcagcccgtgtgcatcctgctgctgatccagcagaagaaccccgtgtggctggatctgctgacagagtttggcctggacgtgaagtccctggccaggctgcagagggcaatcgaggagcagctgcccgagaacagcttccctgattctgtgagcacctacagcaagcagctgcgctttccatggggcgacgattatgtgagcatcacaccagtggtgtcccacgccctgcagtgcgagctggagatcagggcacgctctcccgagaacaagttcagcttcgtgagcagcagcctgcctaactccgcctctatcggaaacctgtgcggcagcctgggaggatacatgcgggtgctgaactatccactgggagtgaagcaggcaaagggaggcaccctgacagagaatagacagaagtccggccactacttcgacgattatcaggtgaccaacgccaagatttgccaggtgctgaataggctgatcggctctgagcctagcaagacacagcggcagagagagagggcccgcaaggtgaggtccaagatcctgcgcaagcagatcgccctgtggatgctgccactgatcgagctgcgcgacatcgccgagtctgagcccaaccagcagcagctggagcacgacgataccctggcccaggccttcctgtccctgccagagtgggagctgggctctctggccggagagttcaatcggagactgcacctggcctttcagaacaatatctactctgccaagtttgcctatcacccaaagctgatgcaggtggccaaggcccaggtgacctgggtgctggagcagctgtccaagcccatcaacaatcaggataccgtgacaggcgagcagtacatctatctgtctagcatgcgggtgcaggacgccgtggccatgtccaacccttgcctgtgcggcgtgccatctctgacagccatctggggcttcatgcacgattaccagcggcagtttaatcagctggtgaacaatgacagccccgtggagttctcctctttcgccttttatgtgagaaacgagaatatccagtccaccgccaagctgacagagcccaacagcatcgccaaggcccggaccgtgtccaatgccaagagacctacaatcagaagcaagagactggccgatctggagatcgacctggtcatccgggtgcacagcgagtcccggatctccgacttcagaagcgccctgaagaccgccctgcctgtggcctttgccggaggcgccctgtaccagccacagctgtctacacagatcgagtggctgaggaccttcacaggccgcagcgagctgtttcacgtgctgaagggcctgcctgcctacggcaggtggctgtatccaagcgagaagcagcccaccaacttcgatgagctggagcgcctgctgacacaggacgatgacaatctgctggtgtccctgggctaccacctgctggagcaccctaccaagagggacaacgccatcacaggctgccacgcctatgcagagaacgcaatcggcctggccaagcgcatcaatccaatcgaggtgcggtttagcggcagagatcacttcctgaaccacgccttttggtccatcgagtgtagctccgagaccatcctgatcaagaattacagggactgagcggccgctcgagtctagagggcccgtttaaacccgctgatcagcctcgactgtgccttctagttgccagccatctgttgtttgcccctcccccgtgccttccttgaccctggaaggtgccactcccactgtcctttcctaataaaatgaggaaattgcatcgcattgtctgagtaggtgtcattctattctggggggtggggtggggcaggacagcaagggggaggattgggaagacaatagcaggcatgctggggatgcggtgggctctatggcttctgaggcggaaagaaccagctggggctctagggggtatccccacgcgccctgtagcggcgcattaagcgcggcgggtgtggtggttacgcgcagcgtgaccgctacacttgccagcgccctagcgcccgctcctttcgctttcttcccttcctttctcgccacgttcgccggctttccccgtcaagctctaaatcgggggctccctttagggttccgatttagtgctttacggcacctcgaccccaaaaaacttgattagggtgatggttcacgtagtgggccatcgccctgatagacggtttttcgccctttgacgttggagtccacgttctttaatagtggactcttgttccaaactggaacaacactcaaccctatctcggtctattcttttgatttataagggattttgccgatttcggcctattggttaaaaaatgagctgatttaacaaaaatttaacgcgaattaattctgtggaatgtgtgtcagttagggtgtggaaagtccccaggctccccagcaggcagaagtatgcaaagcatgcatctcaattagtcagcaaccaggtgtggaaagtccccaggctccccagcaggcagaagtatgcaaagcatgcatctcaattagtcagcaaccatagtcccgcccctaactccgcccatcccgcccctaactccgcccagttccgcccattctccgccccatggctgactaattttttttatttatgcagaggccgaggccgcctctgcctctgagctattccagaagtagtgaggaggcttttttggaggcctaggcttttgcaaaaagctcccgggagcttgtatatccattttcggatctgatcaagagacaggatgaggatcgtttcgcatgattgaacaagatggattgcacgcaggttctccggccgcttgggtggagaggctattcggctatgactgggcacaacagacaatcggctgctctgatgccgccgtgttccggctgtcagcgcaggggcgcccggttctttttgtcaagaccgacctgtccggtgccctgaatgaactgcaggacgaggcagcgcggctatcgtggctggccacgacgggcgttccttgcgcagctgtgctcgacgttgtcactgaagcgggaagggactggctgctattgggcgaagtgccggggcaggatctcctgtcatctcaccttgctcctgccgagaaagtatccatcatggctgatgcaatgcggcggctgcatacgcttgatccggctacctgcccattcgaccaccaagcgaaacatcgcatcgagcgagcacgtactcggatggaagccggtcttgtcgatcaggatgatctggacgaagagcatcaggggctcgcgccagccgaactgttcgccaggctcaaggcgcgcatgcccgacggcgaggatctcgtcgtgacccatggcgatgcctgcttgccgaatatcatggtggaaaatggccgcttttctggattcatcgactgtggccggctgggtgtggcggaccgctatcaggacatagcgttggctacccgtgatattgctgaagagcttggcggcgaatgggctgaccgcttcctcgtgctttacggtatcgccgctcccgattcgcagcgcatcgccttctatcgccttcttgacgagttcttctgagcgggactctggggttcgaaatgaccgaccaagcgacgcccaacctgccatcacgagatttcgattccaccgccgccttctatgaaaggttgggcttcggaatcgttttccgggacgccggctggatgatcctccagcgcggggatctcatgctggagttcttcgcccaccccaacttgtttattgcagcttataatggttacaaataaagcaatagcatcacaaatttcacaaataaagcatttttttcactgcattctagttgtggtttgtccaaactcatcaatgtatcttatcatgtctgtataccgtcgacctctagctagagcttggcgtaatcatggtcatagctgtttcctgtgtgaaattgttatccgctcacaattccacacaacatacgagccggaagcataaagtgtaaagcctggggtgcctaatgagtgagctaactcacattaattgcgttgcgctcactgcccgctttccagtcgggaaacctgtcgtgccagctgcattaatgaatcggccaacgcgcggggagaggcggtttgcgtattgggcgctcttccgcttcctcgctcactgactcgctgcgctcggtcgttcggctgcggcgagcggtatcagctcactcaaaggcggtaatacggttatccacagaatcaggggataacgcaggaaagaacatgtgagcaaaaggccagcaaaaggccaggaaccgtaaaaaggccgcgttgctggcgtttttccataggctccgcccccctgacgagcatcacaaaaatcgacgctcaagtcagaggtggcgaaacccgacaggactataaagataccaggcgtttccccctggaagctccctcgtgcgctctcctgttccgaccctgccgcttaccggatacctgtccgcctttctcccttcgggaagcgtggcgctttctcatagctcacgctgtaggtatctcagttcggtgtaggtcgttcgctccaagctgggctgtgtgcacgaaccccccgttcagcccgaccgctgcgccttatccggtaactatcgtcttgagtccaacccggtaagacacgacttatcgccactggcagcagccactggtaacaggattagcagagcgaggtatgtaggcggtgctacagagttcttgaagtggtggcctaactacggctacactagaagaacagtatttggtatctgcgctctgctgaagccagttaccttcggaaaaagagttggtagctcttgatccggcaaacaaaccaccgctggtagcggtttttttgtttgcaagcagcagattacgcgcagaaaaaaaggatctcaagaagatcctttgatcttttctacggggtctgacgctcagtggaacgaaaactcacgttaagggattttggtcatgagattatcaaaaaggatcttcacctagatccttttaaattaaaaatgaagttttaaatcaatctaaagtatatatgagtaaacttggtctgacagttaccaatgcttaatcagtgaggcacctatctcagcgatctgtctatttcgttcatccatagttgcctgactccccgtcgtgtagataactacgatacgggagggcttaccatctggccccagtgctgcaatgataccgcgagacccacgctcaccggctccagatttatcagcaataaaccagccagccggaagggccgagcgcagaagtggtcctgcaactttatccgcctccatccagtctattaattgttgccgggaagctagagtaagtagttcgccagttaatagtttgcgcaacgttgttgccattgctacaggcatcgtggtgtcacgctcgtcgtttggtatggcttcattcagctccggttcccaacgatcaaggcgagttacatgatcccccatgttgtgcaaaaaagcggttagctccttcggtcctccgatcgttgtcagaagtaagttggccgcagtgttatcactcatggttatggcagcactgcataattctcttactgtcatgccatccgtaagatgcttttctgtgactggtgagtactcaaccaagtcattctgagaatagtgtatgcggcgaccgagttgctcttgcccggcgtcaatacgggataataccgcgccacatagcagaactttaaaagtgctcatcattggaaaacgttcttcggggcgaaaactctcaaggatcttaccgctgttgagatccagttcgatgtaacccactcgtgcacccaactgatcttcagcatcttttactttcaccagcgtttctgggtgagcaaaaacaggaaggcaaaatgccgcaaaaaagggaataagggcgacacggaaatgttgaatactcatactcttcctttttcaatattattgaagcatttatcagggttattgtctcatgagcggatacatatttgaatgtatttagaaaaataaacaaataggggttccgcgcacatttccccgaaaagtgccacctgacgtc

SEQ ID NO: 200 - DNA, 6492 bp, Artificial Sequence
  Synthetic
gacggatcgggagatctcccgatcccctatggtgcactctcagtacaatctgctctgatgccgcatagttaagccagtatctgctccctgcttgtgtgttggaggtcgctgagtagtgcgcgagcaaaatttaagctacaacaaggcaaggcttgaccgacaattgcatgaagaatctgcttagggttaggcgttttgcgctgcttcgcgatgtacgggccagatatacgcgttgacattgattattgactagttattaatagtaatcaattacggggtcattagttcatagcccatatatggagttccgcgttacataacttacggtaaatggcccgcctggctgaccgcccaacgacccccgcccattgacgtcaataatgacgtatgttcccatagtaacgccaatagggactttccattgacgtcaatgggtggagtatttacggtaaactgcccacttggcagtacatcaagtgtatcatatgccaagtacgccccctattgacgtcaatgacggtaaatggcccgcctggcattatgcccagtacatgaccttatgggactttcctacttggcagtacatctacgtattagtcatcgctattaccatggtgatgcggttttggcagtacatcaatgggcgtggatagcggtttgactcacggggatttccaagtctccaccccattgacgtcaatgggagtttgttttggcaccaaaatcaacgggactttccaaaatgtcgtaacaactccgccccattgacgcaaatgggcggtaggcgtgtacggtgggaggtctatataagcagagctctctggctaactagagaacccactgcttactggcttatcgaaattaatacgactcactatagggagacccaagctggctagcgtttaaacttaagcttggtaccgagctcggatccgccaccatgggcaaacggacagccgacggaagcgagttcgagtcaccgaaaaagaagcgaaaagttggctccggaatggagctgtgcacacagctgaactacgtgcgcagcctgtccgccggcaaggcctacttctactatctgtctgagagcggcgagatgtgcccactggacgtggataggacccgcctgcgggcaccaaagggctcctactctgaggcctataagggcaacaagttcgtggacaagaatgtggccccccaggatctggcctactccaaccctcagtttatcgaggagtgctacgtgaagcccggcgtggacgaaatctactgtgccttctccctgagaatcagggccaattctctgacacctgatatgtgcagcgacgatgaggtgcggagcaagctgtccatgctggccaaaatctacaaggacctgaacggctataaggagctggcccacagatatgccaagaatatcctgctgggcacctggctgtggaggaacagggagtgcaggaatatcaccatcgaggtgaccacatccgagctggatacattcgtggtggagcacgcccagaagctgtcctggtacggccactgggacggcgattctaccgagtgtctggagagactgacagcctatctggagagggccctgtctgaccctacagagtacttttatatggatgtgaaggcaaagatgagggtgggatggggcgacgaggtgtacccttctcaggagttcctggacagccgggaggatggcatcccaaccaagcagctggccacagtggagctgctgtctggcaaggagaccgtggcatttcacggacagaaagtgggagccgccctgcagagcatcgacgattggtggaacgagaatgccgacaagccactgcgcgtgaacgagtacggcgccgatcgggagtatgtgatcgcccggagacacgtgacccacggcaatgacttctaccagctggtgagaaacacagagaattggatcgagaccatgacagccagcaggaccatccccaatgatgtgcacttcatcatgtccgtgctgatcaagggcggcctgtttaactgtgccaaggccaattgagcggccgctcgagtctagagggcccgtttaaacccgctgatcagcctcgactgtgccttctagttgccagccatctgttgtttgcccctcccccgtgccttccttgaccctggaaggtgccactcccactgtcctttcctaataaaatgaggaaattgcatcgcattgtctgagtaggtgtcattctattctggggggtggggtggggcaggacagcaagggggaggattgggaagacaatagcaggcatgctggggatgcggtgggctctatggcttctgaggcggaaagaaccagctggggctctagggggtatccccacgcgccctgtagcggcgcattaagcgcggcgggtgtggtggttacgcgcagcgtgaccgctacacttgccagcgccctagcgcccgctcctttcgctttcttcccttcctttctcgccacgttcgccggctttccccgtcaagctctaaatcgggggctccctttagggttccgatttagtgctttacggcacctcgaccccaaaaaacttgattagggtgatggttcacgtagtgggccatcgccctgatagacggtttttcgccctttgacgttggagtccacgttctttaatagtggactcttgttccaaactggaacaacactcaaccctatctcggtctattcttttgatttataagggattttgccgatttcggcctattggttaaaaaatgagctgatttaacaaaaatttaacgcgaattaattctgtggaatgtgtgtcagttagggtgtggaaagtccccaggctccccagcaggcagaagtatgcaaagcatgcatctcaattagtcagcaaccaggtgtggaaagtccccaggctccccagcaggcagaagtatgcaaagcatgcatctcaattagtcagcaaccatagtcccgcccctaactccgcccatcccgcccctaactccgcccagttccgcccattctccgccccatggctgactaattttttttatttatgcagaggccgaggccgcctctgcctctgagctattccagaagtagtgaggaggcttttttggaggcctaggcttttgcaaaaagctcccgggagcttgtatatccattttcggatctgatcaagagacaggatgaggatcgtttcgcatgattgaacaagatggattgcacgcaggttctccggccgcttgggtggagaggctattcggctatgactgggcacaacagacaatcggctgctctgatgccgccgtgttccggctgtcagcgcaggggcgcccggttctttttgtcaagaccgacctgtccggtgccctgaatgaactgcaggacgaggcagcgcggctatcgtggctggccacgacgggcgttccttgcgcagctgtgctcgacgttgtcactgaagcgggaagggactggctgctattgggcgaagtgccggggcaggatctcctgtcatctcaccttgctcctgccgagaaagtatccatcatggctgatgcaatgcggcggctgcatacgcttgatccggctacctgcccattcgaccaccaagcgaaacatcgcatcgagcgagcacgtactcggatggaagccggtcttgtcgatcaggatgatctggacgaagagcatcaggggctcgcgccagccgaactgttcgccaggctcaaggcgcgcatgcccgacggcgaggatctcgtcgtgacccatggcgatgcctgcttgccgaatatcatggtggaaaatggccgcttttctggattcatcgactgtggccggctgggtgtggcggaccgctatcaggacatagcgttggctacccgtgatattgctgaagagcttggcggcgaatgggctgaccgcttcctcgtgctttacggtatcgccgctcccgattcgcagcgcatcgccttctatcgccttcttgacgagttcttctgagcgggactctggggttcgaaatgaccgaccaagcgacgcccaacctgccatcacgagatttcgattccaccgccgccttctatgaaaggttgggcttcggaatcgttttccgggacgccggctggatgatcctccagcgcggggatctcatgctggagttcttcgcccaccccaacttgtttattgcagcttataatggttacaaataaagcaatagcatcacaaatttcacaaataaagcatttttttcactgcattctagttgtggtttgtccaaactcatcaatgtatcttatcatgtctgtataccgtcgacctctagctagagcttggcgtaatcatggtcatagctgtttcctgtgtgaaattgttatccgctcacaattccacacaacatacgagccggaagcataaagtgtaaagcctggggtgcctaatgagtgagctaactcacattaattgcgttgcgctcactgcccgctttccagtcgggaaacctgtcgtgccagctgcattaatgaatcggccaacgcgcggggagaggcggtttgcgtattgggcgctcttccgcttcctcgctcactgactcgctgcgctcggtcgttcggctgcggcgagcggtatcagctcactcaaaggcggtaatacggttatccacagaatcaggggataacgcaggaaagaacatgtgagcaaaaggccagcaaaaggccaggaaccgtaaaaaggccgcgttgctggcgtttttccataggctccgcccccctgacgagcatcacaaaaatcgacgctcaagtcagaggtggcgaaacccgacaggactataaagataccaggcgtttccccctggaagctccctcgtgcgctctcctgttccgaccctgccgcttaccggatacctgtccgcctttctcccttcgggaagcgtggcgctttctcatagctcacgctgtaggtatctcagttcggtgtaggtcgttcgctccaagctgggctgtgtgcacgaaccccccgttcagcccgaccgctgcgccttatccggtaactatcgtcttgagtccaacccggtaagacacgacttatcgccactggcagcagccactggtaacaggattagcagagcgaggtatgtaggcggtgctacagagttcttgaagtggtggcctaactacggctacactagaagaacagtatttggtatctgcgctctgctgaagccagttaccttcggaaaaagagttggtagctcttgatccggcaaacaaaccaccgctggtagcggtttttttgtttgcaagcagcagattacgcgcagaaaaaaaggatctcaagaagatcctttgatcttttctacggggtctgacgctcagtggaacgaaaactcacgttaagggattttggtcatgagattatcaaaaaggatcttcacctagatccttttaaattaaaaatgaagttttaaatcaatctaaagtatatatgagtaaacttggtctgacagttaccaatgcttaatcagtgaggcacctatctcagcgatctgtctatttcgttcatccatagttgcctgactccccgtcgtgtagataactacgatacgggagggcttaccatctggccccagtgctgcaatgataccgcgagacccacgctcaccggctccagatttatcagcaataaaccagccagccggaagggccgagcgcagaagtggtcctgcaactttatccgcctccatccagtctattaattgttgccgggaagctagagtaagtagttcgccagttaatagtttgcgcaacgttgttgccattgctacaggcatcgtggtgtcacgctcgtcgtttggtatggcttcattcagctccggttcccaacgatcaaggcgagttacatgatcccccatgttgtgcaaaaaagcggttagctccttcggtcctccgatcgttgtcagaagtaagttggccgcagtgttatcactcatggttatggcagcactgcataattctcttactgtcatgccatccgtaagatgcttttctgtgactggtgagtactcaaccaagtcattctgagaatagtgtatgcggcgaccgagttgctcttgcccggcgtcaatacgggataataccgcgccacatagcagaactttaaaagtgctcatcattggaaaacgttcttcggggcgaaaactctcaaggatcttaccgctgttgagatccagttcgatgtaacccactcgtgcacccaactgatcttcagcatcttttactttcaccagcgtttctgggtgagcaaaaacaggaaggcaaaatgccgcaaaaaagggaataagggcgacacggaaatgttgaatactcatactcttcctttttcaatattattgaagcatttatcagggttattgtctcatgagcggatacatatttgaatgtatttagaaaaataaacaaataggggttccgcgcacatttccccgaaaagtgccacctgacgtc

SEQ ID NO: 201 - DNA, 6090 bp, Artificial Sequence
  Synthetic
gacggatcgggagatctcccgatcccctatggtgcactctcagtacaatctgctctgatgccgcatagttaagccagtatctgctccctgcttgtgtgttggaggtcgctgagtagtgcgcgagcaaaatttaagctacaacaaggcaaggcttgaccgacaattgcatgaagaatctgcttagggttaggcgttttgcgctgcttcgcgatgtacgggccagatatacgcgttgacattgattattgactagttattaatagtaatcaattacggggtcattagttcatagcccatatatggagttccgcgttacataacttacggtaaatggcccgcctggctgaccgcccaacgacccccgcccattgacgtcaataatgacgtatgttcccatagtaacgccaatagggactttccattgacgtcaatgggtggagtatttacggtaaactgcccacttggcagtacatcaagtgtatcatatgccaagtacgccccctattgacgtcaatgacggtaaatggcccgcctggcattatgcccagtacatgaccttatgggactttcctacttggcagtacatctacgtattagtcatcgctattaccatggtgatgcggttttggcagtacatcaatgggcgtggatagcggtttgactcacggggatttccaagtctccaccccattgacgtcaatgggagtttgttttggcaccaaaatcaacgggactttccaaaatgtcgtaacaactccgccccattgacgcaaatgggcggtaggcgtgtacggtgggaggtctatataagcagagctctctggctaactagagaacccactgcttactggcttatcgaaattaatacgactcactatagggagacccaagctggctagcgtttaaacttaagcttggtaccgagctcggatccgccaccatgggcaaacggacagccgacggaagcgagttcgagtcaccgaaaaagaagcgaaaagttggctccggaatgagccagcggtactactttctgatcagatacaccaacgccaacgctgattacggcctgctggctggcagatgcatctctcagatgcacctgtttatggtcaatcaccaccaggccatgaaccgggtgggagtgtccttcccagactggaatgagagcagcgtgggccaaacaatcgccttcgtgtctgaagataaggagatgatgatcggactgagctttcagccttacttctccctgatggtgaacgagggcctcttcgagatcagcagcgtgtacgaggttcctgacaccagcgccgaggtgaggttcgtgcggaaccaaacaatcggtaagaacttcctgggctctaagaaacgcagaatcaagcggagcatggccagagctgaactgttcggcgtggaacagagcctgcccgtgaccaatgaagatagagtgatcgacagcttccacagaattcctatcagctccggcagcagcagacaggacttcatcctgtttatccagaaagaactggccgacgagagagccaagtctggcttcaacagctacggattcgccaccaaccaggagaagagagccacagtgcccgacctgagattcaacctgttcgaggaagatagcttctgagcggccgctcgagtctagagggcccgtttaaacccgctgatcagcctcgactgtgccttctagttgccagccatctgttgtttgcccctcccccgtgccttccttgaccctggaaggtgccactcccactgtcctttcctaataaaatgaggaaattgcatcgcattgtctgagtaggtgtcattctattctggggggtggggtggggcaggacagcaagggggaggattgggaagacaatagcaggcatgctggggatgcggtgggctctatggcttctgaggcggaaagaaccagctggggctctagggggtatccccacgcgccctgtagcggcgcattaagcgcggcgggtgtggtggttacgcgcagcgtgaccgctacacttgccagcgccctagcgcccgctcctttcgctttcttcccttcctttctcgccacgttcgccggctttccccgtcaagctctaaatcgggggctccctttagggttccgatttagtgctttacggcacctcgaccccaaaaaacttgattagggtgatggttcacgtagtgggccatcgccctgatagacggtttttcgccctttgacgttggagtccacgttctttaatagtggactcttgttccaaactggaacaacactcaaccctatctcggtctattcttttgatttataagggattttgccgatttcggcctattggttaaaaaatgagctgatttaacaaaaatttaacgcgaattaattctgtggaatgtgtgtcagttagggtgtggaaagtccccaggctccccagcaggcagaagtatgcaaagcatgcatctcaattagtcagcaaccaggtgtggaaagtccccaggctccccagcaggcagaagtatgcaaagcatgcatctcaattagtcagcaaccatagtcccgcccctaactccgcccatcccgcccctaactccgcccagttccgcccattctccgccccatggctgactaattttttttatttatgcagaggccgaggccgcctctgcctctgagctattccagaagtagtgaggaggcttttttggaggcctaggcttttgcaaaaagctcccgggagcttgtatatccattttcggatctgatcaagagacaggatgaggatcgtttcgcatgattgaacaagatggattgcacgcaggttctccggccgcttgggtggagaggctattcggctatgactgggcacaacagacaatcggctgctctgatgccgccgtgttccggctgtcagcgcaggggcgcccggttctttttgtcaagaccgacctgtccggtgccctgaatgaactgcaggacgaggcagcgcggctatcgtggctggccacgacgggcgttccttgcgcagctgtgctcgacgttgtcactgaagcgggaagggactggctgctattgggcgaagtgccggggcaggatctcctgtcatctcaccttgctcctgccgagaaagtatccatcatggctgatgcaatgcggcggctgcatacgcttgatccggctacctgcccattcgaccaccaagcgaaacatcgcatcgagcgagcacgtactcggatggaagccggtcttgtcgatcaggatgatctggacgaagagcatcaggggctcgcgccagccgaactgttcgccaggctcaaggcgcgcatgcccgacggcgaggatctcgtcgtgacccatggcgatgcctgcttgccgaatatcatggtggaaaatggccgcttttctggattcatcgactgtggccggctgggtgtggcggaccgctatcaggacatagcgttggctacccgtgatattgctgaagagcttggcggcgaatgggctgaccgcttcctcgtgctttacggtatcgccgctcccgattcgcagcgcatcgccttctatcgccttcttgacgagttcttctgagcgggactctggggttcgaaatgaccgaccaagcgacgcccaacctgccatcacgagatttcgattccaccgccgccttctatgaaaggttgggcttcggaatcgttttccgggacgccggctggatgatcctccagcgcggggatctcatgctggagttcttcgcccaccccaacttgtttattgcagcttataatggttacaaataaagcaatagcatcacaaatttcacaaataaagcatttttttcactgcattctagttgtggtttgtccaaactcatcaatgtatcttatcatgtctgtataccgtcgacctctagctagagcttggcgtaatcatggtcatagctgtttcctgtgtgaaattgttatccgctcacaattccacacaacatacgagccggaagcataaagtgtaaagcctggggtgcctaatgagtgagctaactcacattaattgcgttgcgctcactgcccgctttccagtcgggaaacctgtcgtgccagctgcattaatgaatcggccaacgcgcggggagaggcggtttgcgtattgggcgctcttccgcttcctcgctcactgactcgctgcgctcggtcgttcggctgcggcgagcggtatcagctcactcaaaggcggtaatacggttatccacagaatcaggggataacgcaggaaagaacatgtgagcaaaaggccagcaaaaggccaggaaccgtaaaaaggccgcgttgctggcgtttttccataggctccgcccccctgacgagcatcacaaaaatcgacgctcaagtcagaggtggcgaaacccgacaggactataaagataccaggcgtttccccctggaagctccctcgtgcgctctcctgttccgaccctgccgcttaccggatacctgtccgcctttctcccttcgggaagcgtggcgctttctcatagctcacgctgtaggtatctcagttcggtgtaggtcgttcgctccaagctgggctgtgtgcacgaaccccccgttcagcccgaccgctgcgccttatccggtaactatcgtcttgagtccaacccggtaagacacgacttatcgccactggcagcagccactggtaacaggattagcagagcgaggtatgtaggcggtgctacagagttcttgaagtggtggcctaactacggctacactagaagaacagtatttggtatctgcgctctgctgaagccagttaccttcggaaaaagagttggtagctcttgatccggcaaacaaaccaccgctggtagcggtttttttgtttgcaagcagcagattacgcgcagaaaaaaaggatctcaagaagatcctttgatcttttctacggggtctgacgctcagtggaacgaaaactcacgttaagggattttggtcatgagattatcaaaaaggatcttcacctagatccttttaaattaaaaatgaagttttaaatcaatctaaagtatatatgagtaaacttggtctgacagttaccaatgcttaatcagtgaggcacctatctcagcgatctgtctatttcgttcatccatagttgcctgactccccgtcgtgtagataactacgatacgggagggcttaccatctggccccagtgctgcaatgataccgcgagacccacgctcaccggctccagatttatcagcaataaaccagccagccggaagggccgagcgcagaagtggtcctgcaactttatccgcctccatccagtctattaattgttgccgggaagctagagtaagtagttcgccagttaatagtttgcgcaacgttgttgccattgctacaggcatcgtggtgtcacgctcgtcgtttggtatggcttcattcagctccggttcccaacgatcaaggcgagttacatgatcccccatgttgtgcaaaaaagcggttagctccttcggtcctccgatcgttgtcagaagtaagttggccgcagtgttatcactcatggttatggcagcactgcataattctcttactgtcatgccatccgtaagatgcttttctgtgactggtgagtactcaaccaagtcattctgagaatagtgtatgcggcgaccgagttgctcttgcccggcgtcaatacgggataataccgcgccacatagcagaactttaaaagtgctcatcattggaaaacgttcttcggggcgaaaactctcaaggatcttaccgctgttgagatccagttcgatgtaacccactcgtgcacccaactgatcttcagcatcttttactttcaccagcgtttctgggtgagcaaaaacaggaaggcaaaatgccgcaaaaaagggaataagggcgacacggaaatgttgaatactcatactcttcctttttcaatattattgaagcatttatcagggttattgtctcatgagcggatacatatttgaatgtatttagaaaaataaacaaataggggttccgcgcacatttccccgaaaagtgccacctgacgtc

SEQ ID NO: 202 - DNA, 6558 bp, Artificial Sequence
  Synthetic
gacggatcgggagatctcccgatcccctatggtgcactctcagtacaatctgctctgatgccgcatagttaagccagtatctgctccctgcttgtgtgttggaggtcgctgagtagtgcgcgagcaaaatttaagctacaacaaggcaaggcttgaccgacaattgcatgaagaatctgcttagggttaggcgttttgcgctgcttcgcgatgtacgggccagatatacgcgttgacattgattattgactagttattaatagtaatcaattacggggtcattagttcatagcccatatatggagttccgcgttacataacttacggtaaatggcccgcctggctgaccgcccaacgacccccgcccattgacgtcaataatgacgtatgttcccatagtaacgccaatagggactttccattgacgtcaatgggtggagtatttacggtaaactgcccacttggcagtacatcaagtgtatcatatgccaagtacgccccctattgacgtcaatgacggtaaatggcccgcctggcattatgcccagtacatgaccttatgggactttcctacttggcagtacatctacgtattagtcatcgctattaccatggtgatgcggttttggcagtacatcaatgggcgtggatagcggtttgactcacggggatttccaagtctccaccccattgacgtcaatgggagtttgttttggcaccaaaatcaacgggactttccaaaatgtcgtaacaactccgccccattgacgcaaatgggcggtaggcgtgtacggtgggaggtctatataagcagagctctctggctaactagagaacccactgcttactggcttatcgaaattaatacgactcactatagggagacccaagctggctagcgtttaaacttaagcttggtaccgagctcggatccgccaccatgggcaaacggacagccgacggaagcgagttcgagtcaccgaaaaagaagcgaaaagttggctccggaatgaccatgatcctgaagatcctgaagggcatctccctgaacctgacacctaagcagctggagcagctgaagtcttttgagacctgcttcatcgagtacccagccatcacagaaatctacagcatctttgatcagctgagattcaatcactccctgggcggcgagcccgagtcttttctgctgaccggagaggcaggctctggcaagacagccctgatcaacaattacctgagcaggttccagtccggctctacctggggcaagcagcctgtgctgagcacaagagtgccatccaggatcaacgagcagaataccctgacacagtttctggtggacctggattgtaagagcggcggccggggcatccggcggcggaacgagatcgccctgggagaggcagtggtgaagcagctgaagcggaagtctgtggagctgatcatcgtgaacgagatccaggagctggtggagttctccaccgcagagcagaggcaggtcatcgccaataccttcaagtacatgtctgaggaggcccgggtgagcttcgtgctggtgggcatgccatatgccgatgtgatcgccaccgagccccagtggaactctcgcctgagctggcgccggaagatcgactactttaagctgctgaaggccaatagccacagctccaagacagcctcctatggcttcgatctggagcagaagaagcactttgccagattcgtggccggcctgtctagcaggatgggctttgacgagccccctgtgctgaccaagaacgagctgctgtatcccctgttcgcaatgtgcaggggagagtgtcgggccctgaagcactttctgaaggatgccctgctgaccagcttcaacgacaatgccgatacaatcgacaaggccatcctgtccagaacattcgcctttaagttcccttacctggataacccatttgacaggcccctggagcagctgagcctgcaccagatcgacagcggctccgcctatcacctgaatgccatcaccacagaggataagatcgtggcaccacggttcaccgacgcaatccctctgtccatgctgctgtctaagaatggcctgaaggcctgagcggccgctcgagtctagagggcccgtttaaacccgctgatcagcctcgactgtgccttctagttgccagccatctgttgtttgcccctcccccgtgccttccttgaccctggaaggtgccactcccactgtcctttcctaataaaatgaggaaattgcatcgcattgtctgagtaggtgtcattctattctggggggtggggtggggcaggacagcaagggggaggattgggaagacaatagcaggcatgctggggatgcggtgggctctatggcttctgaggcggaaagaaccagctggggctctagggggtatccccacgcgccctgtagcggcgcattaagcgcggcgggtgtggtggttacgcgcagcgtgaccgctacacttgccagcgccctagcgcccgctcctttcgctttcttcccttcctttctcgccacgttcgccggctttccccgtcaagctctaaatcgggggctccctttagggttccgatttagtgctttacggcacctcgaccccaaaaaacttgattagggtgatggttcacgtagtgggccatcgccctgatagacggtttttcgccctttgacgttggagtccacgttctttaatagtggactcttgttccaaactggaacaacactcaaccctatctcggtctattcttttgatttataagggattttgccgatttcggcctattggttaaaaaatgagctgatttaacaaaaatttaacgcgaattaattctgtggaatgtgtgtcagttagggtgtggaaagtccccaggctccccagcaggcagaagtatgcaaagcatgcatctcaattagtcagcaaccaggtgtggaaagtccccaggctccccagcaggcagaagtatgcaaagcatgcatctcaattagtcagcaaccatagtcccgcccctaactccgcccatcccgcccctaactccgcccagttccgcccattctccgccccatggctgactaattttttttatttatgcagaggccgaggccgcctctgcctctgagctattccagaagtagtgaggaggcttttttggaggcctaggcttttgcaaaaagctcccgggagcttgtatatccattttcggatctgatcaagagacaggatgaggatcgtttcgcatgattgaacaagatggattgcacgcaggttctccggccgcttgggtggagaggctattcggctatgactgggcacaacagacaatcggctgctctgatgccgccgtgttccggctgtcagcgcaggggcgcccggttctttttgtcaagaccgacctgtccggtgccctgaatgaactgcaggacgaggcagcgcggctatcgtggctggccacgacgggcgttccttgcgcagctgtgctcgacgttgtcactgaagcgggaagggactggctgctattgggcgaagtgccggggcaggatctcctgtcatctcaccttgctcctgccgagaaagtatccatcatggctgatgcaatgcggcggctgcatacgcttgatccggctacctgcccattcgaccaccaagcgaaacatcgcatcgagcgagcacgtactcggatggaagccggtcttgtcgatcaggatgatctggacgaagagcatcaggggctcgcgccagccgaactgttcgccaggctcaaggcgcgcatgcccgacggcgaggatctcgtcgtgacccatggcgatgcctgcttgccgaatatcatggtggaaaatggccgcttttctggattcatcgactgtggccggctgggtgtggcggaccgctatcaggacatagcgttggctacccgtgatattgctgaagagcttggcggcgaatgggctgaccgcttcctcgtgctttacggtatcgccgctcccgattcgcagcgcatcgccttctatcgccttcttgacgagttcttctgagcgggactctggggttcgaaatgaccgaccaagcgacgcccaacctgccatcacgagatttcgattccaccgccgccttctatgaaaggttgggcttcggaatcgttttccgggacgccggctggatgatcctccagcgcggggatctcatgctggagttcttcgcccaccccaacttgtttattgcagcttataatggttacaaataaagcaatagcatcacaaatttcacaaataaagcatttttttcactgcattctagttgtggtttgtccaaactcatcaatgtatcttatcatgtctgtataccgtcgacctctagctagagcttggcgtaatcatggtcatagctgtttcctgtgtgaaattgttatccgctcacaattccacacaacatacgagccggaagcataaagtgtaaagcctggggtgcctaatgagtgagctaactcacattaattgcgttgcgctcactgcccgctttccagtcgggaaacctgtcgtgccagctgcattaatgaatcggccaacgcgcggggagaggcggtttgcgtattgggcgctcttccgcttcctcgctcactgactcgctgcgctcggtcgttcggctgcggcgagcggtatcagctcactcaaaggcggtaatacggttatccacagaatcaggggataacgcaggaaagaacatgtgagcaaaaggccagcaaaaggccaggaaccgtaaaaaggccgcgttgctggcgtttttccataggctccgcccccctgacgagcatcacaaaaatcgacgctcaagtcagaggtggcgaaacccgacaggactataaagataccaggcgtttccccctggaagctccctcgtgcgctctcctgttccgaccctgccgcttaccggatacctgtccgcctttctcccttcgggaagcgtggcgctttctcatagctcacgctgtaggtatctcagttcggtgtaggtcgttcgctccaagctgggctgtgtgcacgaaccccccgttcagcccgaccgctgcgccttatccggtaactatcgtcttgagtccaacccggtaagacacgacttatcgccactggcagcagccactggtaacaggattagcagagcgaggtatgtaggcggtgctacagagttcttgaagtggtggcctaactacggctacactagaagaacagtatttggtatctgcgctctgctgaagccagttaccttcggaaaaagagttggtagctcttgatccggcaaacaaaccaccgctggtagcggtttttttgtttgcaagcagcagattacgcgcagaaaaaaaggatctcaagaagatcctttgatcttttctacggggtctgacgctcagtggaacgaaaactcacgttaagggattttggtcatgagattatcaaaaaggatcttcacctagatccttttaaattaaaaatgaagttttaaatcaatctaaagtatatatgagtaaacttggtctgacagttaccaatgcttaatcagtgaggcacctatctcagcgatctgtctatttcgttcatccatagttgcctgactccccgtcgtgtagataactacgatacgggagggcttaccatctggccccagtgctgcaatgataccgcgagacccacgctcaccggctccagatttatcagcaataaaccagccagccggaagggccgagcgcagaagtggtcctgcaactttatccgcctccatccagtctattaattgttgccgggaagctagagtaagtagttcgccagttaatagtttgcgcaacgttgttgccattgctacaggcatcgtggtgtcacgctcgtcgtttggtatggcttcattcagctccggttcccaacgatcaaggcgagttacatgatcccccatgttgtgcaaaaaagcggttagctccttcggtcctccgatcgttgtcagaagtaagttggccgcagtgttatcactcatggttatggcagcactgcataattctcttactgtcatgccatccgtaagatgcttttctgtgactggtgagtactcaaccaagtcattctgagaatagtgtatgcggcgaccgagttgctcttgcccggcgtcaatacgggataataccgcgccacatagcagaactttaaaagtgctcatcattggaaaacgttcttcggggcgaaaactctcaaggatcttaccgctgttgagatccagttcgatgtaacccactcgtgcacccaactgatcttcagcatcttttactttcaccagcgtttctgggtgagcaaaaacaggaaggcaaaatgccgcaaaaaagggaataagggcgacacggaaatgttgaatactcatactcttcctttttcaatattattgaagcatttatcagggttattgtctcatgagcggatacatatttgaatgtatttagaaaaataaacaaataggggttccgcgcacatttccccgaaaagtgccacctgacgtc

SEQ ID NO: 203 - DNA, 4798 bp, Artificial Sequence
  Synthetic
ttgcccggcgtcaatacgggataataccgcgccacatagcagaactttaaaagtgctcatcattggaaaacgttcttcggggcgaaaactctcaaggatcttaccgctgttgagatccagttcgatgtaacccactcgtgcacccaactgatcttcagcatcttttactttcaccagcgtttctgggtgagcaaaaacaggaaggcaaaatgccgcaaaaaagggaataagggcgacacggaaatgttgaatactcatactcttcctttttcattattattgaagcatttatcagggttattgtctcatgagcggatacatatttgaatgtatttagaaaaataaacaaataggggttccgcgcacatttccccgaaaagtgccacctgacgtcgacggatcgggagatctcccgatcccctatggtcgactctcagtacaatctgctctgatgccgcatagttaagccagtatctgctccctgcttgtgtgttggaggtcgctgagtagtgcgcgagcaaaatttaagctacaacaaggcaaggcttgaccgacaattgcatgaagaatctgcttagggttaggcgttttgcgctgcttcgcgatgtacgggccagatatacgcgagggcctatttcccatgattccttcatatttgcatatacgatacaaggctgttagagagataattagaattaatttgactgtaaacacaaagatattagtacaaaatacgtgacgtagaaagtaataatttcttgggtagtttgcagttttaaaattatgttttaaaatggactatcatatgcttaccgtaacttgaaagtatttcgatttcttggctttatatatcttgtggaaaggacgaaacaccgtaatacgactcactatagggtctagaattcctgtgttctgccgaataggcagccaagaatgcgaggtattcggctccgcgacggaggctaagcctacctgctgaacaagcagttaataatgtagcggccgctttttttcttctgaggcggaaagaaccagctggggctctagggggtatccccacgcgccctgtagcggcgcattaagcgcggcgggtgtggtggttacgcgcagcgtgaccgctacacttgccagcgccctagcgcccgctcctttcgctttcttcccttcctttctcgccacgttcgccggctttccccgtcaagctctaaatcgggggctccctttagggttccgatttagtgctttacggcacctcgaccccaaaaaacttgattagggtgatggttcacgtagtgggccatcgccctgatagacggtttttcgccctttgacgttggagtccacgttctttaatagtggactcttgttccaaactggaacaacactcaaccctatctcggtctattcttttgatttataagggattttgccgatttcggcctattggttaaaaaatgagctgatttaacaaaaatttaacgcgaattaattctgtggaatgtgtgtcagttagggtgtggaaagtccccaggctccccagcaggcagaagtatgcaaagcatgcatctcaattagtcagcaaccaggtgtggaaagtccccaggctccccagcaggcagaagtatgcaaagcatgcatctcaattagtcagcaaccatagtcccgcccctaactccgcccatcccgcccctaactccgcccagttccgcccattctccgccccatggctgactaattttttttatttatgcagaggccgaggccgcctctgcctctgagctattccagaagtagtgaggaggcttttttggaggcctaggcttttgcaaaaagctcccgggagcttgtatatccattttcggatctgatcaagagacaggatgaggatcgtttcgcatgattgaacaagatggattgcacgcaggttctccggccgcttgggtggagaggctattcggctatgactgggcacaacagacaatcggctgctctgatgccgccgtgttccggctgtcagcgcaggggcgcccggttctttttgtcaagaccgacctgtccggtgccctgaatgaactgcaggacgaggcagcgcggctatcgtggctggccacgacgggcgttccttgcgcagctgtgctcgacgttgtcactgaagcgggaagggactggctgctattgggcgaagtgccggggcaggatctcctgtcatctcaccttgctcctgccgagaaagtatccatcatggctgatgcaatgcggcggctgcatacgcttgatccggctacctgcccattcgaccaccaagcgaaacatcgcatcgagcgagcacgtactcggatggaagccggtcttgtcgatcaggatgatctggacgaagagcatcaggggctcgcgccagccgaactgttcgccaggctcaaggcgcgcatgcccgacggcgaggatctcgtcgtgacccatggcgatgcctgcttgccgaatatcatggtggaaaatggccgcttttctggattcatcgactgtggccggctgggtgtggcggaccgctatcaggacatagcgttggctacccgtgatattgctgaagagcttggcggcgaatgggctgaccgcttcctcgtgctttacggtatcgccgctcccgattcgcagcgcatcgccttctatcgccttcttgacgagttcttctgagcgggactctggggttcgaaatgaccgaccaagcgacgcccaacctgccatcacgagatttcgattccaccgccgccttctatgaaaggttgggcttcggaatcgttttccgggacgccggctggatgatcctccagcgcggggatctcatgctggagttcttcgcccaccccaacttgtttattgcagcttataatggttacaaataaagcaatagcatcacaaatttcacaaataaagcatttttttcactgcattctagttgtggtttgtccaaactcatcaatgtatcttatcatgtctgtataccgtcgacctctagctagagcttggcgtaatcatggtcatagctgtttcctgtgtgaaattgttatccgctcacaattccacacaacatacgagccggaagcataaagtgtaaagcctggggtgcctaatgagtgagctaactcacattaattgcgttgcgctcactgcccgctttccagtcgggaaacctgtcgtgccagctgcattaatgaatcggccaacgcgcggggagaggcggtttgcgtattgggcgctcttccgcttcctcgctcactgactcgctgcgctcggtcgttcggctgcggcgagcggtatcagctcactcaaaggcggtaatacggttatccacagaatcaggggataacgcaggaaagaacatgtgagcaaaaggccagcaaaaggccaggaaccgtaaaaaggccgcgttgctggcgtttttccataggctccgcccccctgacgagcatcacaaaaatcgacgctcaagtcagaggtggcgaaacccgacaggactataaagataccaggcgtttccccctggaagctccctcgtgcgctctcctgttccgaccctgccgcttaccggatacctgtccgcctttctcccttcgggaagcgtggcgctttctcaatgctcacgctgtaggtatctcagttcggtgtaggtcgttcgctccaagctgggctgtgtgcacgaaccccccgttcagcccgaccgctgcgccttatccggtaactatcgtcttgagtccaacccggtaagacacgacttatcgccactggcagcagccactggtaacaggattagcagagcgaggtatgtaggcggtgctacagagttcttgaagtggtggcctaactacggctacactagaaggacagtatttggtatctgcgctctgctgaagccagttaccttcggaaaaagagttggtagctcttgatccggcaaacaaaccaccgctggtagcggtggtttttttgtttgcaagcagcagattacgcgcagaaaaaaaggatctcaagaagatcctttgatcttttctacggggtctgacgctcagtggaacgaaaactcacgttaagggattttggtcatgagattatcaaaaaggatcttcacctagatccttttaaattaaaaatgaagttttaaatcaatctaaagtatatatgagtaaacttggtctgacagttaccaatgcttaatcagtgaggcacctatctcagcgatctgtctatttcgttcatccatagttgcctgactccccgtcgtgtagataactacgatacgggagggcttaccatctggccccagtgctgcaatgataccgcgagacccacgctcaccggctccagatttatcagcaataaaccagccagccggaagggccgagcgcagaagtggtcctgcaactttatccgcctccatccagtctattaattgttgccgggaagctagagtaagtagttcgccagttaatagtttgcgcaacgttgttgccattgctacaggcatcgtggtgtcacgctcgtcgtttggtatggcttcattcagctccggttcccaacgatcaaggcgagttacatgatcccccatgttgtgcaaaaaagcggttagctccttcggtcctccgatcgttgtcagaagtaagttggccgcagtgttatcactcatggttatggcagcactgcataattctcttactgtcatgccatccgtaagatgcttttctgtgactggtgagtactcaaccaagtcattctgagaatagtgtatgcggcgaccgagttgctc

SEQ ID NO: 204 - DNA, 4798 bp, Artificial Sequence
  Synthetic
ttgcccggcgtcaatacgggataataccgcgccacatagcagaactttaaaagtgctcatcattggaaaacgttcttcggggcgaaaactctcaaggatcttaccgctgttgagatccagttcgatgtaacccactcgtgcacccaactgatcttcagcatcttttactttcaccagcgtttctgggtgagcaaaaacaggaaggcaaaatgccgcaaaaaagggaataagggcgacacggaaatgttgaatactcatactcttcctttttcattattattgaagcatttatcagggttattgtctcatgagcggatacatatttgaatgtatttagaaaaataaacaaataggggttccgcgcacatttccccgaaaagtgccacctgacgtcgacggatcgggagatctcccgatcccctatggtcgactctcagtacaatctgctctgatgccgcatagttaagccagtatctgctccctgcttgtgtgttggaggtcgctgagtagtgcgcgagcaaaatttaagctacaacaaggcaaggcttgaccgacaattgcatgaagaatctgcttagggttaggcgttttgcgctgcttcgcgatgtacgggccagatatacgcgagggcctatttcccatgattccttcatatttgcatatacgatacaaggctgttagagagataattagaattaatttgactgtaaacacaaagatattagtacaaaatacgtgacgtagaaagtaataatttcttgggtagtttgcagttttaaaattatgttttaaaatggactatcatatgcttaccgtaacttgaaagtatttcgatttcttggctttatatatcttgtggaaaggacgaaacaccgtaatacgactcactatagggtctagaattcctgtgttctgccgaataggcagccaagaataatgcaggcaaatcaaccttagtctgaaggcccctacctgctgaacaagcagttaataatgtagcggccgctttttttcttctgaggcggaaagaaccagctggggctctagggggtatccccacgcgccctgtagcggcgcattaagcgcggcgggtgtggtggttacgcgcagcgtgaccgctacacttgccagcgccctagcgcccgctcctttcgctttcttcccttcctttctcgccacgttcgccggctttccccgtcaagctctaaatcgggggctccctttagggttccgatttagtgctttacggcacctcgaccccaaaaaacttgattagggtgatggttcacgtagtgggccatcgccctgatagacggtttttcgccctttgacgttggagtccacgttctttaatagtggactcttgttccaaactggaacaacactcaaccctatctcggtctattcttttgatttataagggattttgccgatttcggcctattggttaaaaaatgagctgatttaacaaaaatttaacgcgaattaattctgtggaatgtgtgtcagttagggtgtggaaagtccccaggctccccagcaggcagaagtatgcaaagcatgcatctcaattagtcagcaaccaggtgtggaaagtccccaggctccccagcaggcagaagtatgcaaagcatgcatctcaattagtcagcaaccatagtcccgcccctaactccgcccatcccgcccctaactccgcccagttccgcccattctccgccccatggctgactaattttttttatttatgcagaggccgaggccgcctctgcctctgagctattccagaagtagtgaggaggcttttttggaggcctaggcttttgcaaaaagctcccgggagcttgtatatccattttcggatctgatcaagagacaggatgaggatcgtttcgcatgattgaacaagatggattgcacgcaggttctccggccgcttgggtggagaggctattcggctatgactgggcacaacagacaatcggctgctctgatgccgccgtgttccggctgtcagcgcaggggcgcccggttctttttgtcaagaccgacctgtccggtgccctgaatgaactgcaggacgaggcagcgcggctatcgtggctggccacgacgggcgttccttgcgcagctgtgctcgacgttgtcactgaagcgggaagggactggctgctattgggcgaagtgccggggcaggatctcctgtcatctcaccttgctcctgccgagaaagtatccatcatggctgatgcaatgcggcggctgcatacgcttgatccggctacctgcccattcgaccaccaagcgaaacatcgcatcgagcgagcacgtactcggatggaagccggtcttgtcgatcaggatgatctggacgaagagcatcaggggctcgcgccagccgaactgttcgccaggctcaaggcgcgcatgcccgacggcgaggatctcgtcgtgacccatggcgatgcctgcttgccgaatatcatggtggaaaatggccgcttttctggattcatcgactgtggccggctgggtgtggcggaccgctatcaggacatagcgttggctacccgtgatattgctgaagagcttggcggcgaatgggctgaccgcttcctcgtgctttacggtatcgccgctcccgattcgcagcgcatcgccttctatcgccttcttgacgagttcttctgagcgggactctggggttcgaaatgaccgaccaagcgacgcccaacctgccatcacgagatttcgattccaccgccgccttctatgaaaggttgggcttcggaatcgttttccgggacgccggctggatgatcctccagcgcggggatctcatgctggagttcttcgcccaccccaacttgtttattgcagcttataatggttacaaataaagcaatagcatcacaaatttcacaaataaagcatttttttcactgcattctagttgtggtttgtccaaactcatcaatgtatcttatcatgtctgtataccgtcgacctctagctagagcttggcgtaatcatggtcatagctgtttcctgtgtgaaattgttatccgctcacaattccacacaacatacgagccggaagcataaagtgtaaagcctggggtgcctaatgagtgagctaactcacattaattgcgttgcgctcactgcccgctttccagtcgggaaacctgtcgtgccagctgcattaatgaatcggccaacgcgcggggagaggcggtttgcgtattgggcgctcttccgcttcctcgctcactgactcgctgcgctcggtcgttcggctgcggcgagcggtatcagctcactcaaaggcggtaatacggttatccacagaatcaggggataacgcaggaaagaacatgtgagcaaaaggccagcaaaaggccaggaaccgtaaaaaggccgcgttgctggcgtttttccataggctccgcccccctgacgagcatcacaaaaatcgacgctcaagtcagaggtggcgaaacccgacaggactataaagataccaggcgtttccccctggaagctccctcgtgcgctctcctgttccgaccctgccgcttaccggatacctgtccgcctttctcccttcgggaagcgtggcgctttctcaatgctcacgctgtaggtatctcagttcggtgtaggtcgttcgctccaagctgggctgtgtgcacgaaccccccgttcagcccgaccgctgcgccttatccggtaactatcgtcttgagtccaacccggtaagacacgacttatcgccactggcagcagccactggtaacaggattagcagagcgaggtatgtaggcggtgctacagagttcttgaagtggtggcctaactacggctacactagaaggacagtatttggtatctgcgctctgctgaagccagttaccttcggaaaaagagttggtagctcttgatccggcaaacaaaccaccgctggtagcggtggtttttttgtttgcaagcagcagattacgcgcagaaaaaaaggatctcaagaagatcctttgatcttttctacggggtctgacgctcagtggaacgaaaactcacgttaagggattttggtcatgagattatcaaaaaggatcttcacctagatccttttaaattaaaaatgaagttttaaatcaatctaaagtatatatgagtaaacttggtctgacagttaccaatgcttaatcagtgaggcacctatctcagcgatctgtctatttcgttcatccatagttgcctgactccccgtcgtgtagataactacgatacgggagggcttaccatctggccccagtgctgcaatgataccgcgagacccacgctcaccggctccagatttatcagcaataaaccagccagccggaagggccgagcgcagaagtggtcctgcaactttatccgcctccatccagtctattaattgttgccgggaagctagagtaagtagttcgccagttaatagtttgcgcaacgttgttgccattgctacaggcatcgtggtgtcacgctcgtcgtttggtatggcttcattcagctccggttcccaacgatcaaggcgagttacatgatcccccatgttgtgcaaaaaagcggttagctccttcggtcctccgatcgttgtcagaagtaagttggccgcagtgttatcactcatggttatggcagcactgcataattctcttactgtcatgccatccgtaagatgcttttctgtgactggtgagtactcaaccaagtcattctgagaatagtgtatgcggcgaccgagttgctc

SEQ ID NO: 205 - DNA, 6757 bp, Artificial Sequence
  Synthetic
gacggatcgggagatctcccgatcccctatggtgcactctcagtacaatctgctctgatgccgcatagttaagccagtatctgctccctgcttgtgtgttggaggtcgctgagtagtgcgcgagcaaaatttaagctacaacaaggcaaggcttgaccgacaattgcatgaagaatctgcttagggttaggcgttttgcgctgcttcgcgatgtacgggccagatatacgcgttgacattgattattgactagttattaatagtaatcaattacggggtcattagttcatagcccatatatggagttccgcgttacataacttacggtaaatggcccgcctggctgaccgcccaacgacccccgcccattgacgtcaataatgacgtatgttcccatagtaacgccaatagggactttccattgacgtcaatgggtggagtatttacggtaaactgcccacttggcagtacatcaagtgtatcatatgccaagtacgccccctattgacgtcaatgacggtaaatggcccgcctggcattatgcccagtacatgaccttatgggactttcctacttggcagtacatctacgtattagtcatcgctattaccatggtgatgcggttttggcagtacatcaatgggcgtggatagcggtttgactcacggggatttccaagtctccaccccattgacgtcaatgggagtttgttttggcaccaaaatcaacgggactttccaaaatgtcgtaacaactccgccccattgacgcaaatgggcggtaggcgtgtacggtgggaggtctatataagcagagctctctggctaactagagaacccactgcttactggcttatcgaaattaatacgactcactatagggagacccaagctggctagcgtttaaacttaagcttggtaccgagctcggccaccatgggcaccatgatcctgaagatcctgaagggcatctccctgaacctgacacctaagcagctggagcagctgaagtcttttgagacctgcttcatcgagtacccagccatcacagaaatctacagcatctttgatcagctgagattcaatcactccctgggcggcgagcccgagtcttttctgctgaccggagaggcaggctctggcaagacagccctgatcaacaattacctgagcaggttccagtccggctctacctggggcaagcagcctgtgctgagcacaagagtgccatccaggatcaacgagcagaataccctgacacagtttctggtggacctggattgtaagagcggcggccggggcatccggcggcggaacgagatcgccctgggagaggcagtggtgaagcagctgaagcggaagtctgtggagctgatcatcgtgaacgagatccaggagctggtggagttctccaccgcagagcagaggcaggtcatcgccaataccttcaagtacatgtctgaggaggcccgggtgagcttcgtgctggtgggcatgccatatgccgatgtgatcgccaccgagccccagtggaactctcgcctgagctggcgccggaagatcgactactttaagctgctgaaggccaatagccacagctccaagacagcctcctatggcttcgatctggagcagaagaagcactttgccagattcgtggccggcctgtctagcaggatgggctttgacgagccccctgtgctgaccaagaacgagctgctgtatcccctgttcgcaatgtgcaggggagagtgtcgggccctgaagcactttctgaaggatgccctgctgaccagcttcaacgacaatgccgatacaatcgacaaggccatcctgtccagaacattcgcctttaagttcccttacctggataacccatttgacaggcccctggagcagctgagcctgcaccagatcgacagcggctccgcctatcacctgaatgccatcaccacagaggataagatcgtggcaccacggttcaccgacgcaatccctctgtccatgctgctgtctaagaatggcctgaaggccggctccggaaaacggacagccgacggaagcgagttcgagtcaccgaaaaagaagcgaaaagttggtggtagtggtggaagcggcgaggccagcggttccggacgggctgacgcattggacgattttgatctggatatgctgggaagtgacgccctcgatgattttgaccttgacatgcttggttcggatgcccttgatgactttgacctcgacatgctcggcagtgacgcccttgatgatttcgacctggacatgctgattaactctagatgagcggccgctcgagtctagagggcccgtttaaacccgctgatcagcctcgactgtgccttctagttgccagccatctgttgtttgcccctcccccgtgccttccttgaccctggaaggtgccactcccactgtcctttcctaataaaatgaggaaattgcatcgcattgtctgagtaggtgtcattctattctggggggtggggtggggcaggacagcaagggggaggattgggaagacaatagcaggcatgctggggatgcggtgggctctatggcttctgaggcggaaagaaccagctggggctctagggggtatccccacgcgccctgtagcggcgcattaagcgcggcgggtgtggtggttacgcgcagcgtgaccgctacacttgccagcgccctagcgcccgctcctttcgctttcttcccttcctttctcgccacgttcgccggctttccccgtcaagctctaaatcgggggctccctttagggttccgatttagtgctttacggcacctcgaccccaaaaaacttgattagggtgatggttcacgtagtgggccatcgccctgatagacggtttttcgccctttgacgttggagtccacgttctttaatagtggactcttgttccaaactggaacaacactcaaccctatctcggtctattcttttgatttataagggattttgccgatttcggcctattggttaaaaaatgagctgatttaacaaaaatttaacgcgaattaattctgtggaatgtgtgtcagttagggtgtggaaagtccccaggctccccagcaggcagaagtatgcaaagcatgcatctcaattagtcagcaaccaggtgtggaaagtccccaggctccccagcaggcagaagtatgcaaagcatgcatctcaattagtcagcaaccatagtcccgcccctaactccgcccatcccgcccctaactccgcccagttccgcccattctccgccccatggctgactaattttttttatttatgcagaggccgaggccgcctctgcctctgagctattccagaagtagtgaggaggcttttttggaggcctaggcttttgcaaaaagctcccgggagcttgtatatccattttcggatctgatcaagagacaggatgaggatcgtttcgcatgattgaacaagatggattgcacgcaggttctccggccgcttgggtggagaggctattcggctatgactgggcacaacagacaatcggctgctctgatgccgccgtgttccggctgtcagcgcaggggcgcccggttctttttgtcaagaccgacctgtccggtgccctgaatgaactgcaggacgaggcagcgcggctatcgtggctggccacgacgggcgttccttgcgcagctgtgctcgacgttgtcactgaagcgggaagggactggctgctattgggcgaagtgccggggcaggatctcctgtcatctcaccttgctcctgccgagaaagtatccatcatggctgatgcaatgcggcggctgcatacgcttgatccggctacctgcccattcgaccaccaagcgaaacatcgcatcgagcgagcacgtactcggatggaagccggtcttgtcgatcaggatgatctggacgaagagcatcaggggctcgcgccagccgaactgttcgccaggctcaaggcgcgcatgcccgacggcgaggatctcgtcgtgacccatggcgatgcctgcttgccgaatatcatggtggaaaatggccgcttttctggattcatcgactgtggccggctgggtgtggcggaccgctatcaggacatagcgttggctacccgtgatattgctgaagagcttggcggcgaatgggctgaccgcttcctcgtgctttacggtatcgccgctcccgattcgcagcgcatcgccttctatcgccttcttgacgagttcttctgagcgggactctggggttcgaaatgaccgaccaagcgacgcccaacctgccatcacgagatttcgattccaccgccgccttctatgaaaggttgggcttcggaatcgttttccgggacgccggctggatgatcctccagcgcggggatctcatgctggagttcttcgcccaccccaacttgtttattgcagcttataatggttacaaataaagcaatagcatcacaaatttcacaaataaagcatttttttcactgcattctagttgtggtttgtccaaactcatcaatgtatcttatcatgtctgtataccgtcgacctctagctagagcttggcgtaatcatggtcatagctgtttcctgtgtgaaattgttatccgctcacaattccacacaacatacgagccggaagcataaagtgtaaagcctggggtgcctaatgagtgagctaactcacattaattgcgttgcgctcactgcccgctttccagtcgggaaacctgtcgtgccagctgcattaatgaatcggccaacgcgcggggagaggcggtttgcgtattgggcgctcttccgcttcctcgctcactgactcgctgcgctcggtcgttcggctgcggcgagcggtatcagctcactcaaaggcggtaatacggttatccacagaatcaggggataacgcaggaaagaacatgtgagcaaaaggccagcaaaaggccaggaaccgtaaaaaggccgcgttgctggcgtttttccataggctccgcccccctgacgagcatcacaaaaatcgacgctcaagtcagaggtggcgaaacccgacaggactataaagataccaggcgtttccccctggaagctccctcgtgcgctctcctgttccgaccctgccgcttaccggatacctgtccgcctttctcccttcgggaagcgtggcgctttctcatagctcacgctgtaggtatctcagttcggtgtaggtcgttcgctccaagctgggctgtgtgcacgaaccccccgttcagcccgaccgctgcgccttatccggtaactatcgtcttgagtccaacccggtaagacacgacttatcgccactggcagcagccactggtaacaggattagcagagcgaggtatgtaggcggtgctacagagttcttgaagtggtggcctaactacggctacactagaagaacagtatttggtatctgcgctctgctgaagccagttaccttcggaaaaagagttggtagctcttgatccggcaaacaaaccaccgctggtagcggtttttttgtttgcaagcagcagattacgcgcagaaaaaaaggatctcaagaagatcctttgatcttttctacggggtctgacgctcagtggaacgaaaactcacgttaagggattttggtcatgagattatcaaaaaggatcttcacctagatccttttaaattaaaaatgaagttttaaatcaatctaaagtatatatgagtaaacttggtctgacagttaccaatgcttaatcagtgaggcacctatctcagcgatctgtctatttcgttcatccatagttgcctgactccccgtcgtgtagataactacgatacgggagggcttaccatctggccccagtgctgcaatgataccgcgagacccacgctcaccggctccagatttatcagcaataaaccagccagccggaagggccgagcgcagaagtggtcctgcaactttatccgcctccatccagtctattaattgttgccgggaagctagagtaagtagttcgccagttaatagtttgcgcaacgttgttgccattgctacaggcatcgtggtgtcacgctcgtcgtttggtatggcttcattcagctccggttcccaacgatcaaggcgagttacatgatcccccatgttgtgcaaaaaagcggttagctccttcggtcctccgatcgttgtcagaagtaagttggccgcagtgttatcactcatggttatggcagcactgcataattctcttactgtcatgccatccgtaagatgcttttctgtgactggtgagtactcaaccaagtcattctgagaatagtgtatgcggcgaccgagttgctcttgcccggcgtcaatacgggataataccgcgccacatagcagaactttaaaagtgctcatcattggaaaacgttcttcggggcgaaaactctcaaggatcttaccgctgttgagatccagttcgatgtaacccactcgtgcacccaactgatcttcagcatcttttactttcaccagcgtttctgggtgagcaaaaacaggaaggcaaaatgccgcaaaaaagggaataagggcgacacggaaatgttgaatactcatactcttcctttttcaatattattgaagcatttatcagggttattgtctcatgagcggatacatatttgaatgtatttagaaaaataaacaaataggggttccgcgcacatttccccgaaaagtgccacctgacgtc

SEQ ID NO: 206 - DNA, 6690 bp, Artificial Sequence
  Synthetic
gacggatcgggagatctcccgatcccctatggtgcactctcagtacaatctgctctgatgccgcatagttaagccagtatctgctccctgcttgtgtgttggaggtcgctgagtagtgcgcgagcaaaatttaagctacaacaaggcaaggcttgaccgacaattgcatgaagaatctgcttagggttaggcgttttgcgctgcttcgcgatgtacgggccagatatacgcgttgacattgattattgactagttattaatagtaatcaattacggggtcattagttcatagcccatatatggagttccgcgttacataacttacggtaaatggcccgcctggctgaccgcccaacgacccccgcccattgacgtcaataatgacgtatgttcccatagtaacgccaatagggactttccattgacgtcaatgggtggagtatttacggtaaactgcccacttggcagtacatcaagtgtatcatatgccaagtacgccccctattgacgtcaatgacggtaaatggcccgcctggcattatgcccagtacatgaccttatgggactttcctacttggcagtacatctacgtattagtcatcgctattaccatggtgatgcggttttggcagtacatcaatgggcgtggatagcggtttgactcacggggatttccaagtctccaccccattgacgtcaatgggagtttgttttggcaccaaaatcaacgggactttccaaaatgtcgtaacaactccgccccattgacgcaaatgggcggtaggcgtgtacggtgggaggtctatataagcagagctctctggctaactagagaacccactgcttactggcttatcgaaattaatacgactcactatagggagacccaagctggctagcgtttaaacttaagcttggtaccgagctcggatccgccaccatgggcaaacggacagccgacggaagcgagttcgagtcaccgaaaaagaagcgaaaagttggctccggaatggccttcctgttttctcccaaggcccgggcctttagcgacgagtccctggagtcttatctgctgagagtggtgagcgagaatttctttgatagctacgagggcctgtccctggccatcagggaggagctgcacgagctggactttgaggcacacggagcattcccagtggacctgaagcggctgaacgtgtaccacgccaagcacaactctcacttcagaatgagagccctgggactgctggagaccctgctggacctgccccggtatgagctgcagaagctggccctgctgaagagcgatatcaagtttaacagctccgtggccctgtacaacaatggcgtggacatccctctgaggttcatcaggcaccacgcagaggaggcagtggattctatcccagtgtgcagccagtgtctggccgaggaggcctacatcaagcagtcctggcacatcaagtgggtgaatgcctgcaccaagcaccagtgtgccctgctgcacaactgccccgagtgttacgcccctatcaactatatcgagaatgagtccatcacacactgctcttgtggctttgagctgagctgcgcctctaccagccccgtgaatacactgtccatcgagcacctgaacaagctgctggacaagggcgagaggaacgattccaatcctctgtttaacaatatgaccctgacagagaggttcgccgccctgctgtggtatcaggagcggtactctcagaccgacaacttctgcctgaatgatgccgtgaactactttagcaagtggcctgccgtgttcaatacagagctggacgagctgtccaagaacgccgagatgaagctgatcgatctgtttaacaagaccgagttcaagtttatcttcggcgacgccatcctggcctgtccaagcacacagaagcagtccgagtctcacttcatctacagggccctgctggactatctggtgaccctggtggagtccaatccaaagacaaagaagcccaacgccgccgatctgctggtgtctgtgctggaggcagccaccctgctgggcacaagcgtggagcaggtgtaccgcctgtatcagaatggcatcctgcagaccgcctttcggcacaagatgaatcagagaatcaacccttacaagggcgccttctttctgaggcacgtgatcgagtataagacatccttcggcaacgataaggcccgcatgtacctgtctgcctggtgagcggccgctcgagtctagagggcccgtttaaacccgctgatcagcctcgactgtgccttctagttgccagccatctgttgtttgcccctcccccgtgccttccttgaccctggaaggtgccactcccactgtcctttcctaataaaatgaggaaattgcatcgcattgtctgagtaggtgtcattctattctggggggtggggtggggcaggacagcaagggggaggattgggaagacaatagcaggcatgctggggatgcggtgggctctatggcttctgaggcggaaagaaccagctggggctctagggggtatccccacgcgccctgtagcggcgcattaagcgcggcgggtgtggtggttacgcgcagcgtgaccgctacacttgccagcgccctagcgcccgctcctttcgctttcttcccttcctttctcgccacgttcgccggctttccccgtcaagctctaaatcgggggctccctttagggttccgatttagtgctttacggcacctcgaccccaaaaaacttgattagggtgatggttcacgtagtgggccatcgccctgatagacggtttttcgccctttgacgttggagtccacgttctttaatagtggactcttgttccaaactggaacaacactcaaccctatctcggtctattcttttgatttataagggattttgccgatttcggcctattggttaaaaaatgagctgatttaacaaaaatttaacgcgaattaattctgtggaatgtgtgtcagttagggtgtggaaagtccccaggctccccagcaggcagaagtatgcaaagcatgcatctcaattagtcagcaaccaggtgtggaaagtccccaggctccccagcaggcagaagtatgcaaagcatgcatctcaattagtcagcaaccatagtcccgcccctaactccgcccatcccgcccctaactccgcccagttccgcccattctccgccccatggctgactaattttttttatttatgcagaggccgaggccgcctctgcctctgagctattccagaagtagtgaggaggcttttttggaggcctaggcttttgcaaaaagctcccgggagcttgtatatccattttcggatctgatcaagagacaggatgaggatcgtttcgcatgattgaacaagatggattgcacgcaggttctccggccgcttgggtggagaggctattcggctatgactgggcacaacagacaatcggctgctctgatgccgccgtgttccggctgtcagcgcaggggcgcccggttctttttgtcaagaccgacctgtccggtgccctgaatgaactgcaggacgaggcagcgcggctatcgtggctggccacgacgggcgttccttgcgcagctgtgctcgacgttgtcactgaagcgggaagggactggctgctattgggcgaagtgccggggcaggatctcctgtcatctcaccttgctcctgccgagaaagtatccatcatggctgatgcaatgcggcggctgcatacgcttgatccggctacctgcccattcgaccaccaagcgaaacatcgcatcgagcgagcacgtactcggatggaagccggtcttgtcgatcaggatgatctggacgaagagcatcaggggctcgcgccagccgaactgttcgccaggctcaaggcgcgcatgcccgacggcgaggatctcgtcgtgacccatggcgatgcctgcttgccgaatatcatggtggaaaatggccgcttttctggattcatcgactgtggccggctgggtgtggcggaccgctatcaggacatagcgttggctacccgtgatattgctgaagagcttggcggcgaatgggctgaccgcttcctcgtgctttacggtatcgccgctcccgattcgcagcgcatcgccttctatcgccttcttgacgagttcttctgagcgggactctggggttcgaaatgaccgaccaagcgacgcccaacctgccatcacgagatttcgattccaccgccgccttctatgaaaggttgggcttcggaatcgttttccgggacgccggctggatgatcctccagcgcggggatctcatgctggagttcttcgcccaccccaacttgtttattgcagcttataatggttacaaataaagcaatagcatcacaaatttcacaaataaagcatttttttcactgcattctagttgtggtttgtccaaactcatcaatgtatcttatcatgtctgtataccgtcgacctctagctagagcttggcgtaatcatggtcatagctgtttcctgtgtgaaattgttatccgctcacaattccacacaacatacgagccggaagcataaagtgtaaagcctggggtgcctaatgagtgagctaactcacattaattgcgttgcgctcactgcccgctttccagtcgggaaacctgtcgtgccagctgcattaatgaatcggccaacgcgcggggagaggcggtttgcgtattgggcgctcttccgcttcctcgctcactgactcgctgcgctcggtcgttcggctgcggcgagcggtatcagctcactcaaaggcggtaatacggttatccacagaatcaggggataacgcaggaaagaacatgtgagcaaaaggccagcaaaaggccaggaaccgtaaaaaggccgcgttgctggcgtttttccataggctccgcccccctgacgagcatcacaaaaatcgacgctcaagtcagaggtggcgaaacccgacaggactataaagataccaggcgtttccccctggaagctccctcgtgcgctctcctgttccgaccctgccgcttaccggatacctgtccgcctttctcccttcgggaagcgtggcgctttctcatagctcacgctgtaggtatctcagttcggtgtaggtcgttcgctccaagctgggctgtgtgcacgaaccccccgttcagcccgaccgctgcgccttatccggtaactatcgtcttgagtccaacccggtaagacacgacttatcgccactggcagcagccactggtaacaggattagcagagcgaggtatgtaggcggtgctacagagttcttgaagtggtggcctaactacggctacactagaagaacagtatttggtatctgcgctctgctgaagccagttaccttcggaaaaagagttggtagctcttgatccggcaaacaaaccaccgctggtagcggtttttttgtttgcaagcagcagattacgcgcagaaaaaaaggatctcaagaagatcctttgatcttttctacggggtctgacgctcagtggaacgaaaactcacgttaagggattttggtcatgagattatcaaaaaggatcttcacctagatccttttaaattaaaaatgaagttttaaatcaatctaaagtatatatgagtaaacttggtctgacagttaccaatgcttaatcagtgaggcacctatctcagcgatctgtctatttcgttcatccatagttgcctgactccccgtcgtgtagataactacgatacgggagggcttaccatctggccccagtgctgcaatgataccgcgagacccacgctcaccggctccagatttatcagcaataaaccagccagccggaagggccgagcgcagaagtggtcctgcaactttatccgcctccatccagtctattaattgttgccgggaagctagagtaagtagttcgccagttaatagtttgcgcaacgttgttgccattgctacaggcatcgtggtgtcacgctcgtcgtttggtatggcttcattcagctccggttcccaacgatcaaggcgagttacatgatcccccatgttgtgcaaaaaagcggttagctccttcggtcctccgatcgttgtcagaagtaagttggccgcagtgttatcactcatggttatggcagcactgcataattctcttactgtcatgccatccgtaagatgcttttctgtgactggtgagtactcaaccaagtcattctgagaatagtgtatgcggcgaccgagttgctcttgcccggcgtcaatacgggataataccgcgccacatagcagaactttaaaagtgctcatcattggaaaacgttcttcggggcgaaaactctcaaggatcttaccgctgttgagatccagttcgatgtaacccactcgtgcacccaactgatcttcagcatcttttactttcaccagcgtttctgggtgagcaaaaacaggaaggcaaaatgccgcaaaaaagggaataagggcgacacggaaatgttgaatactcatactcttcctttttcaatattattgaagcatttatcagggttattgtctcatgagcggatacatatttgaatgtatttagaaaaataaacaaataggggttccgcgcacatttccccgaaaagtgccacctgacgtc

SEQ ID NO: 207 - DNA, 7548 bp, Artificial Sequence
  Synthetic
gacggatcgggagatctcccgatcccctatggtgcactctcagtacaatctgctctgatgccgcatagttaagccagtatctgctccctgcttgtgtgttggaggtcgctgagtagtgcgcgagcaaaatttaagctacaacaaggcaaggcttgaccgacaattgcatgaagaatctgcttagggttaggcgttttgcgctgcttcgcgatgtacgggccagatatacgcgttgacattgattattgactagttattaatagtaatcaattacggggtcattagttcatagcccatatatggagttccgcgttacataacttacggtaaatggcccgcctggctgaccgcccaacgacccccgcccattgacgtcaataatgacgtatgttcccatagtaacgccaatagggactttccattgacgtcaatgggtggagtatttacggtaaactgcccacttggcagtacatcaagtgtatcatatgccaagtacgccccctattgacgtcaatgacggtaaatggcccgcctggcattatgcccagtacatgaccttatgggactttcctacttggcagtacatctacgtattagtcatcgctattaccatggtgatgcggttttggcagtacatcaatgggcgtggatagcggtttgactcacggggatttccaagtctccaccccattgacgtcaatgggagtttgttttggcaccaaaatcaacgggactttccaaaatgtcgtaacaactccgccccattgacgcaaatgggcggtaggcgtgtacggtgggaggtctatataagcagagctctctggctaactagagaacccactgcttactggcttatcgaaattaatacgactcactatagggagacccaagctggctagcgtttaaacttaagcttggtaccgagctcggatccgccaccatgggcaaacggacagccgacggaagcgagttcgagtcaccgaaaaagaagcgaaaagttggctccggaatgcacctgaaggagctgctggagatcaccgacaccacagagagggatcgctccctgcggagagccttctctccctacaccgccatgatcgacatcacaggctccgaggccgtggccctgatcatcctgctgaatctgacatatcgcaagaaccaggtggacgatctgctggacaagaagctggccaagcaggccctgaagagcgaggatcacatcaacaagtgcatcaaggagatcgcctggtttcacacccacaatctgaagtacccagatatccgggtgtccaagcagaacctggccgtggagccccctacactgcactcttatgtgctgagctccgccaattaccccaaggcctatggctggagccacaattccgccaaggtgaactttgccaagctgttcgtgagctactttaagtggcagaaccaggtgtcctggctggcccaggtgctggccaccaatagcgacaactggaagtctgccttcacaagcctgggcctgtccgtgaaggccttcaagagcctgtgcgtgaccgtgaagaatagcctgcctgaggaggccatcccagactccgtggataggtattctcgccagatcagaatgccataccacgacggctatctggccgtgacccccgtgatcagccacgtggtgcagtccaagatccagcaggccgccatcgataagcgggccagattctccaacgtggagtttacacgcccagcagccgtgtctatgctggccgccagcctgggaggcgtgatcaatgtgctgaactacccaccctatatcagaagcaagtaccacggcctgtctaatagcagggccttcaagctgaacaatggccagaccgtgtttaacgtggaggccctgctgaagcctgagctgatcaaggccctggagggcatcatcttctccaacaatgccctggccctgaagcagaggcgccagcagaaggtgaagaatatcaaggagctgcgcaacacactgctggagtggttctctccagtgtttgagtggcggctggacgccatcgagaatggctacgatctggagcagctggagtccgcctctgagagactggagtataagatcctgtccctgcccgacaatgagctgccttctctgaccatcccactgttcagactgctgaacgagatgctgggcggcgtgagcatgacacagaggtacgcctttcaccccaagctgatgtcccctctgaaggccgccctgcagtggctgctggtgaatctgaccgaccagaagcacgtgctgatcgaggaggacgatgagcactacagatatctgcacctgtccggcatcagggtgtttgatgcccaggccctgtctaacccatactgctctggcatccccagcctgacagccgtgtggggaatgatccactcttatcagaggaagctgaatgaggccctgggcaccaacgtgcggttcaccagcttcagctggttcatcagaaactacagcgccgtggcaggcaagaagctgcccgagctgagcctgcagggagcacagcagtccagactgaagaggcctggcatcatcgacggcaagtactgtgacctggtgttcgatctgatcatccacatcgatggctatgaggacgatctgcaggccgtggacagcaagcctgatatcctgaaggcccacttcccatccaattttgcaggaggcgtgatgcaccagccagagctgaactctaatatcaactggtgctgtctgtatagcaatgagaaccagctgtttgagaagctgcggagactgcccctgtccggctgctgggtcatgcctaccgagcacaagatccaggacctggatgagctgctgctgctgctgaactctgacagcaagctgtccccttctatgatgggctacatgctgctgaccgagccaatggcccgcgtgggcagcctggagcggctgcactgttacgccgagcctgccatcggcgtggtgaagtatgaggccgccacatctgtgaggctgaagggcatcggcaattatttcaacagcgccttttggatgctggatgcccaggagaagttcatgctgatgaagaaggtgtgagcggccgctcgagtctagagggcccgtttaaacccgctgatcagcctcgactgtgccttctagttgccagccatctgttgtttgcccctcccccgtgccttccttgaccctggaaggtgccactcccactgtcctttcctaataaaatgaggaaattgcatcgcattgtctgagtaggtgtcattctattctggggggtggggtggggcaggacagcaagggggaggattgggaagacaatagcaggcatgctggggatgcggtgggctctatggcttctgaggcggaaagaaccagctggggctctagggggtatccccacgcgccctgtagcggcgcattaagcgcggcgggtgtggtggttacgcgcagcgtgaccgctacacttgccagcgccctagcgcccgctcctttcgctttcttcccttcctttctcgccacgttcgccggctttccccgtcaagctctaaatcgggggctccctttagggttccgatttagtgctttacggcacctcgaccccaaaaaacttgattagggtgatggttcacgtagtgggccatcgccctgatagacggtttttcgccctttgacgttggagtccacgttctttaatagtggactcttgttccaaactggaacaacactcaaccctatctcggtctattcttttgatttataagggattttgccgatttcggcctattggttaaaaaatgagctgatttaacaaaaatttaacgcgaattaattctgtggaatgtgtgtcagttagggtgtggaaagtccccaggctccccagcaggcagaagtatgcaaagcatgcatctcaattagtcagcaaccaggtgtggaaagtccccaggctccccagcaggcagaagtatgcaaagcatgcatctcaattagtcagcaaccatagtcccgcccctaactccgcccatcccgcccctaactccgcccagttccgcccattctccgccccatggctgactaattttttttatttatgcagaggccgaggccgcctctgcctctgagctattccagaagtagtgaggaggcttttttggaggcctaggcttttgcaaaaagctcccgggagcttgtatatccattttcggatctgatcaagagacaggatgaggatcgtttcgcatgattgaacaagatggattgcacgcaggttctccggccgcttgggtggagaggctattcggctatgactgggcacaacagacaatcggctgctctgatgccgccgtgttccggctgtcagcgcaggggcgcccggttctttttgtcaagaccgacctgtccggtgccctgaatgaactgcaggacgaggcagcgcggctatcgtggctggccacgacgggcgttccttgcgcagctgtgctcgacgttgtcactgaagcgggaagggactggctgctattgggcgaagtgccggggcaggatctcctgtcatctcaccttgctcctgccgagaaagtatccatcatggctgatgcaatgcggcggctgcatacgcttgatccggctacctgcccattcgaccaccaagcgaaacatcgcatcgagcgagcacgtactcggatggaagccggtcttgtcgatcaggatgatctggacgaagagcatcaggggctcgcgccagccgaactgttcgccaggctcaaggcgcgcatgcccgacggcgaggatctcgtcgtgacccatggcgatgcctgcttgccgaatatcatggtggaaaatggccgcttttctggattcatcgactgtggccggctgggtgtggcggaccgctatcaggacatagcgttggctacccgtgatattgctgaagagcttggcggcgaatgggctgaccgcttcctcgtgctttacggtatcgccgctcccgattcgcagcgcatcgccttctatcgccttcttgacgagttcttctgagcgggactctggggttcgaaatgaccgaccaagcgacgcccaacctgccatcacgagatttcgattccaccgccgccttctatgaaaggttgggcttcggaatcgttttccgggacgccggctggatgatcctccagcgcggggatctcatgctggagttcttcgcccaccccaacttgtttattgcagcttataatggttacaaataaagcaatagcatcacaaatttcacaaataaagcatttttttcactgcattctagttgtggtttgtccaaactcatcaatgtatcttatcatgtctgtataccgtcgacctctagctagagcttggcgtaatcatggtcatagctgtttcctgtgtgaaattgttatccgctcacaattccacacaacatacgagccggaagcataaagtgtaaagcctggggtgcctaatgagtgagctaactcacattaattgcgttgcgctcactgcccgctttccagtcgggaaacctgtcgtgccagctgcattaatgaatcggccaacgcgcggggagaggcggtttgcgtattgggcgctcttccgcttcctcgctcactgactcgctgcgctcggtcgttcggctgcggcgagcggtatcagctcactcaaaggcggtaatacggttatccacagaatcaggggataacgcaggaaagaacatgtgagcaaaaggccagcaaaaggccaggaaccgtaaaaaggccgcgttgctggcgtttttccataggctccgcccccctgacgagcatcacaaaaatcgacgctcaagtcagaggtggcgaaacccgacaggactataaagataccaggcgtttccccctggaagctccctcgtgcgctctcctgttccgaccctgccgcttaccggatacctgtccgcctttctcccttcgggaagcgtggcgctttctcatagctcacgctgtaggtatctcagttcggtgtaggtcgttcgctccaagctgggctgtgtgcacgaaccccccgttcagcccgaccgctgcgccttatccggtaactatcgtcttgagtccaacccggtaagacacgacttatcgccactggcagcagccactggtaacaggattagcagagcgaggtatgtaggcggtgctacagagttcttgaagtggtggcctaactacggctacactagaagaacagtatttggtatctgcgctctgctgaagccagttaccttcggaaaaagagttggtagctcttgatccggcaaacaaaccaccgctggtagcggtttttttgtttgcaagcagcagattacgcgcagaaaaaaaggatctcaagaagatcctttgatcttttctacggggtctgacgctcagtggaacgaaaactcacgttaagggattttggtcatgagattatcaaaaaggatcttcacctagatccttttaaattaaaaatgaagttttaaatcaatctaaagtatatatgagtaaacttggtctgacagttaccaatgcttaatcagtgaggcacctatctcagcgatctgtctatttcgttcatccatagttgcctgactccccgtcgtgtagataactacgatacgggagggcttaccatctggccccagtgctgcaatgataccgcgagacccacgctcaccggctccagatttatcagcaataaaccagccagccggaagggccgagcgcagaagtggtcctgcaactttatccgcctccatccagtctattaattgttgccgggaagctagagtaagtagttcgccagttaatagtttgcgcaacgttgttgccattgctacaggcatcgtggtgtcacgctcgtcgtttggtatggcttcattcagctccggttcccaacgatcaaggcgagttacatgatcccccatgttgtgcaaaaaagcggttagctccttcggtcctccgatcgttgtcagaagtaagttggccgcagtgttatcactcatggttatggcagcactgcataattctcttactgtcatgccatccgtaagatgcttttctgtgactggtgagtactcaaccaagtcattctgagaatagtgtatgcggcgaccgagttgctcttgcccggcgtcaatacgggataataccgcgccacatagcagaactttaaaagtgctcatcattggaaaacgttcttcggggcgaaaactctcaaggatcttaccgctgttgagatccagttcgatgtaacccactcgtgcacccaactgatcttcagcatcttttactttcaccagcgtttctgggtgagcaaaaacaggaaggcaaaatgccgcaaaaaagggaataagggcgacacggaaatgttgaatactcatactcttcctttttcaatattattgaagcatttatcagggttattgtctcatgagcggatacatatttgaatgtatttagaaaaataaacaaataggggttccgcgcacatttccccgaaaagtgccacctgacgtc

SEQ ID NO: 208 - DNA, 6513 bp, Artificial Sequence
  Synthetic
gacggatcgggagatctcccgatcccctatggtgcactctcagtacaatctgctctgatgccgcatagttaagccagtatctgctccctgcttgtgtgttggaggtcgctgagtagtgcgcgagcaaaatttaagctacaacaaggcaaggcttgaccgacaattgcatgaagaatctgcttagggttaggcgttttgcgctgcttcgcgatgtacgggccagatatacgcgttgacattgattattgactagttattaatagtaatcaattacggggtcattagttcatagcccatatatggagttccgcgttacataacttacggtaaatggcccgcctggctgaccgcccaacgacccccgcccattgacgtcaataatgacgtatgttcccatagtaacgccaatagggactttccattgacgtcaatgggtggagtatttacggtaaactgcccacttggcagtacatcaagtgtatcatatgccaagtacgccccctattgacgtcaatgacggtaaatggcccgcctggcattatgcccagtacatgaccttatgggactttcctacttggcagtacatctacgtattagtcatcgctattaccatggtgatgcggttttggcagtacatcaatgggcgtggatagcggtttgactcacggggatttccaagtctccaccccattgacgtcaatgggagtttgttttggcaccaaaatcaacgggactttccaaaatgtcgtaacaactccgccccattgacgcaaatgggcggtaggcgtgtacggtgggaggtctatataagcagagctctctggctaactagagaacccactgcttactggcttatcgaaattaatacgactcactatagggagacccaagctggctagcgtttaaacttaagcttggtaccgagctcggatccgccaccatgggcaaacggacagccgacggaagcgagttcgagtcaccgaaaaagaagcgaaaagttggctccggaatggagctgtgcaacatcctgaagtacgacaggtctctgtatcccggcaaggccgtgttcttttacaagaccgccgacagcgattttgtgccactggaggccgatatcaacaagatcaggggaccaaagagcggcttcaccgaggcctttacacctcagttctctccaaagaatatcagccctcaggacctgacccacaacaatatcctgacactggaggagtgctatgtgccccctaacgtggagcacatcttctgtaggttttctctgcgcgtgcaggccaatagcctggtgcccagcggctgctccgatcctgaggtgttttccctgctgaaggagctggccgagaccttcaaggagtgcggaggatacaaggagctggccgtgcggtattgtagaaacatcctgatcggcacatggctgtggcggaaccagaataccggcaatacacagatcgagatcaagacctctaagggcagctgttacctgatcgacaacacaagaaagctggcctgggagagcaagtgggcctccgacgatctgaaggtgctggaggagctgtccaacgagatcgagtctgccctgaccgaccctaacgtgttctggagcgccgatatcacagccaagatcgaggcctccttctgccaggaaatctacccatctcagatcctgaacgacaaggtgaagcagggcgaggcctccaagcagtttgtgaaggccaagtgtgccgatggccggtatgccgtgtccttcaattctgtgaagatcggcgccgccctgcagagcatcgacgattggtgggacgaggatgcctccaagaggctgcgcgtgcacgagttcggagcagacaaggagatcggagtggcacggagaccacccgatagcgagcagaacttttactccatcttcaagaataccgagtggtatctgtccgccctgaagaattgtatcacaaacaagaatgagaagatcgatcccgccatctactatctgttttctgtgctgatcaagggcggcatgttccagaagaaggccgaggccaagaaggcctgagcggccgctcgagtctagagggcccgtttaaacccgctgatcagcctcgactgtgccttctagttgccagccatctgttgtttgcccctcccccgtgccttccttgaccctggaaggtgccactcccactgtcctttcctaataaaatgaggaaattgcatcgcattgtctgagtaggtgtcattctattctggggggtggggtggggcaggacagcaagggggaggattgggaagacaatagcaggcatgctggggatgcggtgggctctatggcttctgaggcggaaagaaccagctggggctctagggggtatccccacgcgccctgtagcggcgcattaagcgcggcgggtgtggtggttacgcgcagcgtgaccgctacacttgccagcgccctagcgcccgctcctttcgctttcttcccttcctttctcgccacgttcgccggctttccccgtcaagctctaaatcgggggctccctttagggttccgatttagtgctttacggcacctcgaccccaaaaaacttgattagggtgatggttcacgtagtgggccatcgccctgatagacggtttttcgccctttgacgttggagtccacgttctttaatagtggactcttgttccaaactggaacaacactcaaccctatctcggtctattcttttgatttataagggattttgccgatttcggcctattggttaaaaaatgagctgatttaacaaaaatttaacgcgaattaattctgtggaatgtgtgtcagttagggtgtggaaagtccccaggctccccagcaggcagaagtatgcaaagcatgcatctcaattagtcagcaaccaggtgtggaaagtccccaggctccccagcaggcagaagtatgcaaagcatgcatctcaattagtcagcaaccatagtcccgcccctaactccgcccatcccgcccctaactccgcccagttccgcccattctccgccccatggctgactaattttttttatttatgcagaggccgaggccgcctctgcctctgagctattccagaagtagtgaggaggcttttttggaggcctaggcttttgcaaaaagctcccgggagcttgtatatccattttcggatctgatcaagagacaggatgaggatcgtttcgcatgattgaacaagatggattgcacgcaggttctccggccgcttgggtggagaggctattcggctatgactgggcacaacagacaatcggctgctctgatgccgccgtgttccggctgtcagcgcaggggcgcccggttctttttgtcaagaccgacctgtccggtgccctgaatgaactgcaggacgaggcagcgcggctatcgtggctggccacgacgggcgttccttgcgcagctgtgctcgacgttgtcactgaagcgggaagggactggctgctattgggcgaagtgccggggcaggatctcctgtcatctcaccttgctcctgccgagaaagtatccatcatggctgatgcaatgcggcggctgcatacgcttgatccggctacctgcccattcgaccaccaagcgaaacatcgcatcgagcgagcacgtactcggatggaagccggtcttgtcgatcaggatgatctggacgaagagcatcaggggctcgcgccagccgaactgttcgccaggctcaaggcgcgcatgcccgacggcgaggatctcgtcgtgacccatggcgatgcctgcttgccgaatatcatggtggaaaatggccgcttttctggattcatcgactgtggccggctgggtgtggcggaccgctatcaggacatagcgttggctacccgtgatattgctgaagagcttggcggcgaatgggctgaccgcttcctcgtgctttacggtatcgccgctcccgattcgcagcgcatcgccttctatcgccttcttgacgagttcttctgagcgggactctggggttcgaaatgaccgaccaagcgacgcccaacctgccatcacgagatttcgattccaccgccgccttctatgaaaggttgggcttcggaatcgttttccgggacgccggctggatgatcctccagcgcggggatctcatgctggagttcttcgcccaccccaacttgtttattgcagcttataatggttacaaataaagcaatagcatcacaaatttcacaaataaagcatttttttcactgcattctagttgtggtttgtccaaactcatcaatgtatcttatcatgtctgtataccgtcgacctctagctagagcttggcgtaatcatggtcatagctgtttcctgtgtgaaattgttatccgctcacaattccacacaacatacgagccggaagcataaagtgtaaagcctggggtgcctaatgagtgagctaactcacattaattgcgttgcgctcactgcccgctttccagtcgggaaacctgtcgtgccagctgcattaatgaatcggccaacgcgcggggagaggcggtttgcgtattgggcgctcttccgcttcctcgctcactgactcgctgcgctcggtcgttcggctgcggcgagcggtatcagctcactcaaaggcggtaatacggttatccacagaatcaggggataacgcaggaaagaacatgtgagcaaaaggccagcaaaaggccaggaaccgtaaaaaggccgcgttgctggcgtttttccataggctccgcccccctgacgagcatcacaaaaatcgacgctcaagtcagaggtggcgaaacccgacaggactataaagataccaggcgtttccccctggaagctccctcgtgcgctctcctgttccgaccctgccgcttaccggatacctgtccgcctttctcccttcgggaagcgtggcgctttctcatagctcacgctgtaggtatctcagttcggtgtaggtcgttcgctccaagctgggctgtgtgcacgaaccccccgttcagcccgaccgctgcgccttatccggtaactatcgtcttgagtccaacccggtaagacacgacttatcgccactggcagcagccactggtaacaggattagcagagcgaggtatgtaggcggtgctacagagttcttgaagtggtggcctaactacggctacactagaagaacagtatttggtatctgcgctctgctgaagccagttaccttcggaaaaagagttggtagctcttgatccggcaaacaaaccaccgctggtagcggtttttttgtttgcaagcagcagattacgcgcagaaaaaaaggatctcaagaagatcctttgatcttttctacggggtctgacgctcagtggaacgaaaactcacgttaagggattttggtcatgagattatcaaaaaggatcttcacctagatccttttaaattaaaaatgaagttttaaatcaatctaaagtatatatgagtaaacttggtctgacagttaccaatgcttaatcagtgaggcacctatctcagcgatctgtctatttcgttcatccatagttgcctgactccccgtcgtgtagataactacgatacgggagggcttaccatctggccccagtgctgcaatgataccgcgagacccacgctcaccggctccagatttatcagcaataaaccagccagccggaagggccgagcgcagaagtggtcctgcaactttatccgcctccatccagtctattaattgttgccgggaagctagagtaagtagttcgccagttaatagtttgcgcaacgttgttgccattgctacaggcatcgtggtgtcacgctcgtcgtttggtatggcttcattcagctccggttcccaacgatcaaggcgagttacatgatcccccatgttgtgcaaaaaagcggttagctccttcggtcctccgatcgttgtcagaagtaagttggccgcagtgttatcactcatggttatggcagcactgcataattctcttactgtcatgccatccgtaagatgcttttctgtgactggtgagtactcaaccaagtcattctgagaatagtgtatgcggcgaccgagttgctcttgcccggcgtcaatacgggataataccgcgccacatagcagaactttaaaagtgctcatcattggaaaacgttcttcggggcgaaaactctcaaggatcttaccgctgttgagatccagttcgatgtaacccactcgtgcacccaactgatcttcagcatcttttactttcaccagcgtttctgggtgagcaaaaacaggaaggcaaaatgccgcaaaaaagggaataagggcgacacggaaatgttgaatactcatactcttcctttttcaatattattgaagcatttatcagggttattgtctcatgagcggatacatatttgaatgtatttagaaaaataaacaaataggggttccgcgcacatttccccgaaaagtgccacctgacgtc

SEQ ID NO: 209 - DNA, 6072 bp, Artificial Sequence
  Synthetic
gacggatcgggagatctcccgatcccctatggtgcactctcagtacaatctgctctgatgccgcatagttaagccagtatctgctccctgcttgtgtgttggaggtcgctgagtagtgcgcgagcaaaatttaagctacaacaaggcaaggcttgaccgacaattgcatgaagaatctgcttagggttaggcgttttgcgctgcttcgcgatgtacgggccagatatacgcgttgacattgattattgactagttattaatagtaatcaattacggggtcattagttcatagcccatatatggagttccgcgttacataacttacggtaaatggcccgcctggctgaccgcccaacgacccccgcccattgacgtcaataatgacgtatgttcccatagtaacgccaatagggactttccattgacgtcaatgggtggagtatttacggtaaactgcccacttggcagtacatcaagtgtatcatatgccaagtacgccccctattgacgtcaatgacggtaaatggcccgcctggcattatgcccagtacatgaccttatgggactttcctacttggcagtacatctacgtattagtcatcgctattaccatggtgatgcggttttggcagtacatcaatgggcgtggatagcggtttgactcacggggatttccaagtctccaccccattgacgtcaatgggagtttgttttggcaccaaaatcaacgggactttccaaaatgtcgtaacaactccgccccattgacgcaaatgggcggtaggcgtgtacggtgggaggtctatataagcagagctctctggctaactagagaacccactgcttactggcttatcgaaattaatacgactcactatagggagacccaagctggctagcgtttaaacttaagcttggtaccgagctcggatccgccaccatgggcaaacggacagccgacggaagcgagttcgagtcaccgaaaaagaagcgaaaagttggctccggaatgcagagatactactttaccgtgcatttcctgcctaaacaagccaatctggccctgctgacaggcagatgcatcagcatcatgcacggctttatcctgaagcacaacatcgagggaatgggcgttaccttcccagcctggtccgacagcagcatcggcaacgaaattgccttcgtgtacaccgacaaggaaatcctcaacacactgaaggaccaggcctacttcgtggatatgcaggattgcggcttcttcaaggtctcccaagtgctggctgtgcccgattcttgcgaggaagtgcggttcatccggaaccaggccgtggccaaaatcttcaccggagagagcagaagaaggctgaaaagactgcagaagagagccctggccagaggcgaagatttcaaccccaagaagatcgaggcccctcgggaaatcgatatcttccacagagtggccatgaccagcaagagctctcaggaggactacatcctgcacatccagaaacaggacgtggactgtcaggctgagccttactttagcaattacggcctggccagcaacgagaagttcaagggaacagtgcctgacctgagccccagcatcgacagaaactgagcggccgctcgagtctagagggcccgtttaaacccgctgatcagcctcgactgtgccttctagttgccagccatctgttgtttgcccctcccccgtgccttccttgaccctggaaggtgccactcccactgtcctttcctaataaaatgaggaaattgcatcgcattgtctgagtaggtgtcattctattctggggggtggggtggggcaggacagcaagggggaggattgggaagacaatagcaggcatgctggggatgcggtgggctctatggcttctgaggcggaaagaaccagctggggctctagggggtatccccacgcgccctgtagcggcgcattaagcgcggcgggtgtggtggttacgcgcagcgtgaccgctacacttgccagcgccctagcgcccgctcctttcgctttcttcccttcctttctcgccacgttcgccggctttccccgtcaagctctaaatcgggggctccctttagggttccgatttagtgctttacggcacctcgaccccaaaaaacttgattagggtgatggttcacgtagtgggccatcgccctgatagacggtttttcgccctttgacgttggagtccacgttctttaatagtggactcttgttccaaactggaacaacactcaaccctatctcggtctattcttttgatttataagggattttgccgatttcggcctattggttaaaaaatgagctgatttaacaaaaatttaacgcgaattaattctgtggaatgtgtgtcagttagggtgtggaaagtccccaggctccccagcaggcagaagtatgcaaagcatgcatctcaattagtcagcaaccaggtgtggaaagtccccaggctccccagcaggcagaagtatgcaaagcatgcatctcaattagtcagcaaccatagtcccgcccctaactccgcccatcccgcccctaactccgcccagttccgcccattctccgccccatggctgactaattttttttatttatgcagaggccgaggccgcctctgcctctgagctattccagaagtagtgaggaggcttttttggaggcctaggcttttgcaaaaagctcccgggagcttgtatatccattttcggatctgatcaagagacaggatgaggatcgtttcgcatgattgaacaagatggattgcacgcaggttctccggccgcttgggtggagaggctattcggctatgactgggcacaacagacaatcggctgctctgatgccgccgtgttccggctgtcagcgcaggggcgcccggttctttttgtcaagaccgacctgtccggtgccctgaatgaactgcaggacgaggcagcgcggctatcgtggctggccacgacgggcgttccttgcgcagctgtgctcgacgttgtcactgaagcgggaagggactggctgctattgggcgaagtgccggggcaggatctcctgtcatctcaccttgctcctgccgagaaagtatccatcatggctgatgcaatgcggcggctgcatacgcttgatccggctacctgcccattcgaccaccaagcgaaacatcgcatcgagcgagcacgtactcggatggaagccggtcttgtcgatcaggatgatctggacgaagagcatcaggggctcgcgccagccgaactgttcgccaggctcaaggcgcgcatgcccgacggcgaggatctcgtcgtgacccatggcgatgcctgcttgccgaatatcatggtggaaaatggccgcttttctggattcatcgactgtggccggctgggtgtggcggaccgctatcaggacatagcgttggctacccgtgatattgctgaagagcttggcggcgaatgggctgaccgcttcctcgtgctttacggtatcgccgctcccgattcgcagcgcatcgccttctatcgccttcttgacgagttcttctgagcgggactctggggttcgaaatgaccgaccaagcgacgcccaacctgccatcacgagatttcgattccaccgccgccttctatgaaaggttgggcttcggaatcgttttccgggacgccggctggatgatcctccagcgcggggatctcatgctggagttcttcgcccaccccaacttgtttattgcagcttataatggttacaaataaagcaatagcatcacaaatttcacaaataaagcatttttttcactgcattctagttgtggtttgtccaaactcatcaatgtatcttatcatgtctgtataccgtcgacctctagctagagcttggcgtaatcatggtcatagctgtttcctgtgtgaaattgttatccgctcacaattccacacaacatacgagccggaagcataaagtgtaaagcctggggtgcctaatgagtgagctaactcacattaattgcgttgcgctcactgcccgctttccagtcgggaaacctgtcgtgccagctgcattaatgaatcggccaacgcgcggggagaggcggtttgcgtattgggcgctcttccgcttcctcgctcactgactcgctgcgctcggtcgttcggctgcggcgagcggtatcagctcactcaaaggcggtaatacggttatccacagaatcaggggataacgcaggaaagaacatgtgagcaaaaggccagcaaaaggccaggaaccgtaaaaaggccgcgttgctggcgtttttccataggctccgcccccctgacgagcatcacaaaaatcgacgctcaagtcagaggtggcgaaacccgacaggactataaagataccaggcgtttccccctggaagctccctcgtgcgctctcctgttccgaccctgccgcttaccggatacctgtccgcctttctcccttcgggaagcgtggcgctttctcatagctcacgctgtaggtatctcagttcggtgtaggtcgttcgctccaagctgggctgtgtgcacgaaccccccgttcagcccgaccgctgcgccttatccggtaactatcgtcttgagtccaacccggtaagacacgacttatcgccactggcagcagccactggtaacaggattagcagagcgaggtatgtaggcggtgctacagagttcttgaagtggtggcctaactacggctacactagaagaacagtatttggtatctgcgctctgctgaagccagttaccttcggaaaaagagttggtagctcttgatccggcaaacaaaccaccgctggtagcggtttttttgtttgcaagcagcagattacgcgcagaaaaaaaggatctcaagaagatcctttgatcttttctacggggtctgacgctcagtggaacgaaaactcacgttaagggattttggtcatgagattatcaaaaaggatcttcacctagatccttttaaattaaaaatgaagttttaaatcaatctaaagtatatatgagtaaacttggtctgacagttaccaatgcttaatcagtgaggcacctatctcagcgatctgtctatttcgttcatccatagttgcctgactccccgtcgtgtagataactacgatacgggagggcttaccatctggccccagtgctgcaatgataccgcgagacccacgctcaccggctccagatttatcagcaataaaccagccagccggaagggccgagcgcagaagtggtcctgcaactttatccgcctccatccagtctattaattgttgccgggaagctagagtaagtagttcgccagttaatagtttgcgcaacgttgttgccattgctacaggcatcgtggtgtcacgctcgtcgtttggtatggcttcattcagctccggttcccaacgatcaaggcgagttacatgatcccccatgttgtgcaaaaaagcggttagctccttcggtcctccgatcgttgtcagaagtaagttggccgcagtgttatcactcatggttatggcagcactgcataattctcttactgtcatgccatccgtaagatgcttttctgtgactggtgagtactcaaccaagtcattctgagaatagtgtatgcggcgaccgagttgctcttgcccggcgtcaatacgggataataccgcgccacatagcagaactttaaaagtgctcatcattggaaaacgttcttcggggcgaaaactctcaaggatcttaccgctgttgagatccagttcgatgtaacccactcgtgcacccaactgatcttcagcatcttttactttcaccagcgtttctgggtgagcaaaaacaggaaggcaaaatgccgcaaaaaagggaataagggcgacacggaaatgttgaatactcatactcttcctttttcaatattattgaagcatttatcagggttattgtctcatgagcggatacatatttgaatgtatttagaaaaataaacaaataggggttccgcgcacatttccccgaaaagtgccacctgacgtc

SEQ ID NO: 210 - DNA, 6462 bp, Artificial Sequence
  Synthetic
gacggatcgggagatctcccgatcccctatggtgcactctcagtacaatctgctctgatgccgcatagttaagccagtatctgctccctgcttgtgtgttggaggtcgctgagtagtgcgcgagcaaaatttaagctacaacaaggcaaggcttgaccgacaattgcatgaagaatctgcttagggttaggcgttttgcgctgcttcgcgatgtacgggccagatatacgcgttgacattgattattgactagttattaatagtaatcaattacggggtcattagttcatagcccatatatggagttccgcgttacataacttacggtaaatggcccgcctggctgaccgcccaacgacccccgcccattgacgtcaataatgacgtatgttcccatagtaacgccaatagggactttccattgacgtcaatgggtggagtatttacggtaaactgcccacttggcagtacatcaagtgtatcatatgccaagtacgccccctattgacgtcaatgacggtaaatggcccgcctggcattatgcccagtacatgaccttatgggactttcctacttggcagtacatctacgtattagtcatcgctattaccatggtgatgcggttttggcagtacatcaatgggcgtggatagcggtttgactcacggggatttccaagtctccaccccattgacgtcaatgggagtttgttttggcaccaaaatcaacgggactttccaaaatgtcgtaacaactccgccccattgacgcaaatgggcggtaggcgtgtacggtgggaggtctatataagcagagctctctggctaactagagaacccactgcttactggcttatcgaaattaatacgactcactatagggagacccaagctggctagcgtttaaacttaagcttggtaccgagctcggatccgccaccatgggcaaacggacagccgacggaagcgagttcgagtcaccgaaaaagaagcgaaaagttggctccggaatgaacgccctgaccgagatccagatcgagaagctgaggaatttcagcgactgcatcgtgatgcacccacagatcaagacaatcttcaacgactttgatgagctgaggctgaatcgcaagtttcagtccgaccagcagtgtatgctgctgatcggcgataccggcgtgggcaagtctcacacaatcaaccactacaagaagcgggtgctggccacccagaactattccagaaatacaatgcccgtgctggtgtcccggatcagccggggcaagggcctggacgccaccctggtgcagatgctggccgatctggagctgttcggcagctcccagatcaagaagcggggctacaagaccgatctgacaaagaagctggtggagtctctgatcaaggcccaggtggagctgctgatcatcaacgagttccaggagctgatcgagtttaagtctgtgcaggagagacagcagatcgccaatggcctgaagtttatcagcgaggaggccaaggtgcctatcgtgctggtgggcatgccatgggcagcaaagatcgcagaggagccacagtgggcctctaggctggtgcggaagagaaagctggagtatttcagcctgaagaacgactccaagtactttcgccagtatctgatgggcctggccaagaagatgcctttcgatgtgccccctaagctggagagcaagaacaccacaatcgccctgtttgcagcatgcaggggagagaatcgcgccctgaagcacctgctgctggaggccctgaagctggccctgagctgtaacgagtacctggagaataagcacttcatcaccgcctatgacaagtttgatttctttaacgacaaggagaagctgaagtccaagaatcctttcaagcaggacatcaaggatatcgaaatctacgaagtgatcaagaacagcagctataacccaaatgccctggaccccgaggatatgctgacagatcgggtgtttgccatcgtgaagtgagcggccgctcgagtctagagggcccgtttaaacccgctgatcagcctcgactgtgccttctagttgccagccatctgttgtttgcccctcccccgtgccttccttgaccctggaaggtgccactcccactgtcctttcctaataaaatgaggaaattgcatcgcattgtctgagtaggtgtcattctattctggggggtggggtggggcaggacagcaagggggaggattgggaagacaatagcaggcatgctggggatgcggtgggctctatggcttctgaggcggaaagaaccagctggggctctagggggtatccccacgcgccctgtagcggcgcattaagcgcggcgggtgtggtggttacgcgcagcgtgaccgctacacttgccagcgccctagcgcccgctcctttcgctttcttcccttcctttctcgccacgttcgccggctttccccgtcaagctctaaatcgggggctccctttagggttccgatttagtgctttacggcacctcgaccccaaaaaacttgattagggtgatggttcacgtagtgggccatcgccctgatagacggtttttcgccctttgacgttggagtccacgttctttaatagtggactcttgttccaaactggaacaacactcaaccctatctcggtctattcttttgatttataagggattttgccgatttcggcctattggttaaaaaatgagctgatttaacaaaaatttaacgcgaattaattctgtggaatgtgtgtcagttagggtgtggaaagtccccaggctccccagcaggcagaagtatgcaaagcatgcatctcaattagtcagcaaccaggtgtggaaagtccccaggctccccagcaggcagaagtatgcaaagcatgcatctcaattagtcagcaaccatagtcccgcccctaactccgcccatcccgcccctaactccgcccagttccgcccattctccgccccatggctgactaattttttttatttatgcagaggccgaggccgcctctgcctctgagctattccagaagtagtgaggaggcttttttggaggcctaggcttttgcaaaaagctcccgggagcttgtatatccattttcggatctgatcaagagacaggatgaggatcgtttcgcatgattgaacaagatggattgcacgcaggttctccggccgcttgggtggagaggctattcggctatgactgggcacaacagacaatcggctgctctgatgccgccgtgttccggctgtcagcgcaggggcgcccggttctttttgtcaagaccgacctgtccggtgccctgaatgaactgcaggacgaggcagcgcggctatcgtggctggccacgacgggcgttccttgcgcagctgtgctcgacgttgtcactgaagcgggaagggactggctgctattgggcgaagtgccggggcaggatctcctgtcatctcaccttgctcctgccgagaaagtatccatcatggctgatgcaatgcggcggctgcatacgcttgatccggctacctgcccattcgaccaccaagcgaaacatcgcatcgagcgagcacgtactcggatggaagccggtcttgtcgatcaggatgatctggacgaagagcatcaggggctcgcgccagccgaactgttcgccaggctcaaggcgcgcatgcccgacggcgaggatctcgtcgtgacccatggcgatgcctgcttgccgaatatcatggtggaaaatggccgcttttctggattcatcgactgtggccggctgggtgtggcggaccgctatcaggacatagcgttggctacccgtgatattgctgaagagcttggcggcgaatgggctgaccgcttcctcgtgctttacggtatcgccgctcccgattcgcagcgcatcgccttctatcgccttcttgacgagttcttctgagcgggactctggggttcgaaatgaccgaccaagcgacgcccaacctgccatcacgagatttcgattccaccgccgccttctatgaaaggttgggcttcggaatcgttttccgggacgccggctggatgatcctccagcgcggggatctcatgctggagttcttcgcccaccccaacttgtttattgcagcttataatggttacaaataaagcaatagcatcacaaatttcacaaataaagcatttttttcactgcattctagttgtggtttgtccaaactcatcaatgtatcttatcatgtctgtataccgtcgacctctagctagagcttggcgtaatcatggtcatagctgtttcctgtgtgaaattgttatccgctcacaattccacacaacatacgagccggaagcataaagtgtaaagcctggggtgcctaatgagtgagctaactcacattaattgcgttgcgctcactgcccgctttccagtcgggaaacctgtcgtgccagctgcattaatgaatcggccaacgcgcggggagaggcggtttgcgtattgggcgctcttccgcttcctcgctcactgactcgctgcgctcggtcgttcggctgcggcgagcggtatcagctcactcaaaggcggtaatacggttatccacagaatcaggggataacgcaggaaagaacatgtgagcaaaaggccagcaaaaggccaggaaccgtaaaaaggccgcgttgctggcgtttttccataggctccgcccccctgacgagcatcacaaaaatcgacgctcaagtcagaggtggcgaaacccgacaggactataaagataccaggcgtttccccctggaagctccctcgtgcgctctcctgttccgaccctgccgcttaccggatacctgtccgcctttctcccttcgggaagcgtggcgctttctcatagctcacgctgtaggtatctcagttcggtgtaggtcgttcgctccaagctgggctgtgtgcacgaaccccccgttcagcccgaccgctgcgccttatccggtaactatcgtcttgagtccaacccggtaagacacgacttatcgccactggcagcagccactggtaacaggattagcagagcgaggtatgtaggcggtgctacagagttcttgaagtggtggcctaactacggctacactagaagaacagtatttggtatctgcgctctgctgaagccagttaccttcggaaaaagagttggtagctcttgatccggcaaacaaaccaccgctggtagcggtttttttgtttgcaagcagcagattacgcgcagaaaaaaaggatctcaagaagatcctttgatcttttctacggggtctgacgctcagtggaacgaaaactcacgttaagggattttggtcatgagattatcaaaaaggatcttcacctagatccttttaaattaaaaatgaagttttaaatcaatctaaagtatatatgagtaaacttggtctgacagttaccaatgcttaatcagtgaggcacctatctcagcgatctgtctatttcgttcatccatagttgcctgactccccgtcgtgtagataactacgatacgggagggcttaccatctggccccagtgctgcaatgataccgcgagacccacgctcaccggctccagatttatcagcaataaaccagccagccggaagggccgagcgcagaagtggtcctgcaactttatccgcctccatccagtctattaattgttgccgggaagctagagtaagtagttcgccagttaatagtttgcgcaacgttgttgccattgctacaggcatcgtggtgtcacgctcgtcgtttggtatggcttcattcagctccggttcccaacgatcaaggcgagttacatgatcccccatgttgtgcaaaaaagcggttagctccttcggtcctccgatcgttgtcagaagtaagttggccgcagtgttatcactcatggttatggcagcactgcataattctcttactgtcatgccatccgtaagatgcttttctgtgactggtgagtactcaaccaagtcattctgagaatagtgtatgcggcgaccgagttgctcttgcccggcgtcaatacgggataataccgcgccacatagcagaactttaaaagtgctcatcattggaaaacgttcttcggggcgaaaactctcaaggatcttaccgctgttgagatccagttcgatgtaacccactcgtgcacccaactgatcttcagcatcttttactttcaccagcgtttctgggtgagcaaaaacaggaaggcaaaatgccgcaaaaaagggaataagggcgacacggaaatgttgaatactcatactcttcctttttcaatattattgaagcatttatcagggttattgtctcatgagcggatacatatttgaatgtatttagaaaaataaacaaataggggttccgcgcacatttccccgaaaagtgccacctgacgtc

SEQ ID NO: 211 - DNA, 4798 bp, Artificial Sequence
  Synthetic
ttgcccggcgtcaatacgggataataccgcgccacatagcagaactttaaaagtgctcatcattggaaaacgttcttcggggcgaaaactctcaaggatcttaccgctgttgagatccagttcgatgtaacccactcgtgcacccaactgatcttcagcatcttttactttcaccagcgtttctgggtgagcaaaaacaggaaggcaaaatgccgcaaaaaagggaataagggcgacacggaaatgttgaatactcatactcttcctttttcattattattgaagcatttatcagggttattgtctcatgagcggatacatatttgaatgtatttagaaaaataaacaaataggggttccgcgcacatttccccgaaaagtgccacctgacgtcgacggatcgggagatctcccgatcccctatggtcgactctcagtacaatctgctctgatgccgcatagttaagccagtatctgctccctgcttgtgtgttggaggtcgctgagtagtgcgcgagcaaaatttaagctacaacaaggcaaggcttgaccgacaattgcatgaagaatctgcttagggttaggcgttttgcgctgcttcgcgatgtacgggccagatatacgcgagggcctatttcccatgattccttcatatttgcatatacgatacaaggctgttagagagataattagaattaatttgactgtaaacacaaagatattagtacaaaatacgtgacgtagaaagtaataatttcttgggtagtttgcagttttaaaattatgttttaaaatggactatcatatgcttaccgtaacttgaaagtatttcgatttcttggctttatatatcttgtggaaaggacgaaacaccgtaatacgactcactatagggtctagaattcctgtgacctgccgtataggcagctgaagatgcgaggtattcggctccgcgacggaggctaagtaattctgccgaaaaggcagtgagtagtgtagcggccgctttttttcttctgaggcggaaagaaccagctggggctctagggggtatccccacgcgccctgtagcggcgcattaagcgcggcgggtgtggtggttacgcgcagcgtgaccgctacacttgccagcgccctagcgcccgctcctttcgctttcttcccttcctttctcgccacgttcgccggctttccccgtcaagctctaaatcgggggctccctttagggttccgatttagtgctttacggcacctcgaccccaaaaaacttgattagggtgatggttcacgtagtgggccatcgccctgatagacggtttttcgccctttgacgttggagtccacgttctttaatagtggactcttgttccaaactggaacaacactcaaccctatctcggtctattcttttgatttataagggattttgccgatttcggcctattggttaaaaaatgagctgatttaacaaaaatttaacgcgaattaattctgtggaatgtgtgtcagttagggtgtggaaagtccccaggctccccagcaggcagaagtatgcaaagcatgcatctcaattagtcagcaaccaggtgtggaaagtccccaggctccccagcaggcagaagtatgcaaagcatgcatctcaattagtcagcaaccatagtcccgcccctaactccgcccatcccgcccctaactccgcccagttccgcccattctccgccccatggctgactaattttttttatttatgcagaggccgaggccgcctctgcctctgagctattccagaagtagtgaggaggcttttttggaggcctaggcttttgcaaaaagctcccgggagcttgtatatccattttcggatctgatcaagagacaggatgaggatcgtttcgcatgattgaacaagatggattgcacgcaggttctccggccgcttgggtggagaggctattcggctatgactgggcacaacagacaatcggctgctctgatgccgccgtgttccggctgtcagcgcaggggcgcccggttctttttgtcaagaccgacctgtccggtgccctgaatgaactgcaggacgaggcagcgcggctatcgtggctggccacgacgggcgttccttgcgcagctgtgctcgacgttgtcactgaagcgggaagggactggctgctattgggcgaagtgccggggcaggatctcctgtcatctcaccttgctcctgccgagaaagtatccatcatggctgatgcaatgcggcggctgcatacgcttgatccggctacctgcccattcgaccaccaagcgaaacatcgcatcgagcgagcacgtactcggatggaagccggtcttgtcgatcaggatgatctggacgaagagcatcaggggctcgcgccagccgaactgttcgccaggctcaaggcgcgcatgcccgacggcgaggatctcgtcgtgacccatggcgatgcctgcttgccgaatatcatggtggaaaatggccgcttttctggattcatcgactgtggccggctgggtgtggcggaccgctatcaggacatagcgttggctacccgtgatattgctgaagagcttggcggcgaatgggctgaccgcttcctcgtgctttacggtatcgccgctcccgattcgcagcgcatcgccttctatcgccttcttgacgagttcttctgagcgggactctggggttcgaaatgaccgaccaagcgacgcccaacctgccatcacgagatttcgattccaccgccgccttctatgaaaggttgggcttcggaatcgttttccgggacgccggctggatgatcctccagcgcggggatctcatgctggagttcttcgcccaccccaacttgtttattgcagcttataatggttacaaataaagcaatagcatcacaaatttcacaaataaagcatttttttcactgcattctagttgtggtttgtccaaactcatcaatgtatcttatcatgtctgtataccgtcgacctctagctagagcttggcgtaatcatggtcatagctgtttcctgtgtgaaattgttatccgctcacaattccacacaacatacgagccggaagcataaagtgtaaagcctggggtgcctaatgagtgagctaactcacattaattgcgttgcgctcactgcccgctttccagtcgggaaacctgtcgtgccagctgcattaatgaatcggccaacgcgcggggagaggcggtttgcgtattgggcgctcttccgcttcctcgctcactgactcgctgcgctcggtcgttcggctgcggcgagcggtatcagctcactcaaaggcggtaatacggttatccacagaatcaggggataacgcaggaaagaacatgtgagcaaaaggccagcaaaaggccaggaaccgtaaaaaggccgcgttgctggcgtttttccataggctccgcccccctgacgagcatcacaaaaatcgacgctcaagtcagaggtggcgaaacccgacaggactataaagataccaggcgtttccccctggaagctccctcgtgcgctctcctgttccgaccctgccgcttaccggatacctgtccgcctttctcccttcgggaagcgtggcgctttctcaatgctcacgctgtaggtatctcagttcggtgtaggtcgttcgctccaagctgggctgtgtgcacgaaccccccgttcagcccgaccgctgcgccttatccggtaactatcgtcttgagtccaacccggtaagacacgacttatcgccactggcagcagccactggtaacaggattagcagagcgaggtatgtaggcggtgctacagagttcttgaagtggtggcctaactacggctacactagaaggacagtatttggtatctgcgctctgctgaagccagttaccttcggaaaaagagttggtagctcttgatccggcaaacaaaccaccgctggtagcggtggtttttttgtttgcaagcagcagattacgcgcagaaaaaaaggatctcaagaagatcctttgatcttttctacggggtctgacgctcagtggaacgaaaactcacgttaagggattttggtcatgagattatcaaaaaggatcttcacctagatccttttaaattaaaaatgaagttttaaatcaatctaaagtatatatgagtaaacttggtctgacagttaccaatgcttaatcagtgaggcacctatctcagcgatctgtctatttcgttcatccatagttgcctgactccccgtcgtgtagataactacgatacgggagggcttaccatctggccccagtgctgcaatgataccgcgagacccacgctcaccggctccagatttatcagcaataaaccagccagccggaagggccgagcgcagaagtggtcctgcaactttatccgcctccatccagtctattaattgttgccgggaagctagagtaagtagttcgccagttaatagtttgcgcaacgttgttgccattgctacaggcatcgtggtgtcacgctcgtcgtttggtatggcttcattcagctccggttcccaacgatcaaggcgagttacatgatcccccatgttgtgcaaaaaagcggttagctccttcggtcctccgatcgttgtcagaagtaagttggccgcagtgttatcactcatggttatggcagcactgcataattctcttactgtcatgccatccgtaagatgcttttctgtgactggtgagtactcaaccaagtcattctgagaatagtgtatgcggcgaccgagttgctc

SEQ ID NO: 212 - DNA, 4798 bp, Artificial Sequence
  Synthetic
ttgcccggcgtcaatacgggataataccgcgccacatagcagaactttaaaagtgctcatcattggaaaacgttcttcggggcgaaaactctcaaggatcttaccgctgttgagatccagttcgatgtaacccactcgtgcacccaactgatcttcagcatcttttactttcaccagcgtttctgggtgagcaaaaacaggaaggcaaaatgccgcaaaaaagggaataagggcgacacggaaatgttgaatactcatactcttcctttttcattattattgaagcatttatcagggttattgtctcatgagcggatacatatttgaatgtatttagaaaaataaacaaataggggttccgcgcacatttccccgaaaagtgccacctgacgtcgacggatcgggagatctcccgatcccctatggtcgactctcagtacaatctgctctgatgccgcatagttaagccagtatctgctccctgcttgtgtgttggaggtcgctgagtagtgcgcgagcaaaatttaagctacaacaaggcaaggcttgaccgacaattgcatgaagaatctgcttagggttaggcgttttgcgctgcttcgcgatgtacgggccagatatacgcgagggcctatttcccatgattccttcatatttgcatatacgatacaaggctgttagagagataattagaattaatttgactgtaaacacaaagatattagtacaaaatacgtgacgtagaaagtaataatttcttgggtagtttgcagttttaaaattatgttttaaaatggactatcatatgcttaccgtaacttgaaagtatttcgatttcttggctttatatatcttgtggaaaggacgaaacaccgtaatacgactcactatagggtctagaattcctgtgacctgccgtataggcagctgaagataatgcaggcaaatcaaccttagtctgaaggcctaattctgccgaaaaggcagtgagtagtgtagcggccgctttttttcttctgaggcggaaagaaccagctggggctctagggggtatccccacgcgccctgtagcggcgcattaagcgcggcgggtgtggtggttacgcgcagcgtgaccgctacacttgccagcgccctagcgcccgctcctttcgctttcttcccttcctttctcgccacgttcgccggctttccccgtcaagctctaaatcgggggctccctttagggttccgatttagtgctttacggcacctcgaccccaaaaaacttgattagggtgatggttcacgtagtgggccatcgccctgatagacggtttttcgccctttgacgttggagtccacgttctttaatagtggactcttgttccaaactggaacaacactcaaccctatctcggtctattcttttgatttataagggattttgccgatttcggcctattggttaaaaaatgagctgatttaacaaaaatttaacgcgaattaattctgtggaatgtgtgtcagttagggtgtggaaagtccccaggctccccagcaggcagaagtatgcaaagcatgcatctcaattagtcagcaaccaggtgtggaaagtccccaggctccccagcaggcagaagtatgcaaagcatgcatctcaattagtcagcaaccatagtcccgcccctaactccgcccatcccgcccctaactccgcccagttccgcccattctccgccccatggctgactaattttttttatttatgcagaggccgaggccgcctctgcctctgagctattccagaagtagtgaggaggcttttttggaggcctaggcttttgcaaaaagctcccgggagcttgtatatccattttcggatctgatcaagagacaggatgaggatcgtttcgcatgattgaacaagatggattgcacgcaggttctccggccgcttgggtggagaggctattcggctatgactgggcacaacagacaatcggctgctctgatgccgccgtgttccggctgtcagcgcaggggcgcccggttctttttgtcaagaccgacctgtccggtgccctgaatgaactgcaggacgaggcagcgcggctatcgtggctggccacgacgggcgttccttgcgcagctgtgctcgacgttgtcactgaagcgggaagggactggctgctattgggcgaagtgccggggcaggatctcctgtcatctcaccttgctcctgccgagaaagtatccatcatggctgatgcaatgcggcggctgcatacgcttgatccggctacctgcccattcgaccaccaagcgaaacatcgcatcgagcgagcacgtactcggatggaagccggtcttgtcgatcaggatgatctggacgaagagcatcaggggctcgcgccagccgaactgttcgccaggctcaaggcgcgcatgcccgacggcgaggatctcgtcgtgacccatggcgatgcctgcttgccgaatatcatggtggaaaatggccgcttttctggattcatcgactgtggccggctgggtgtggcggaccgctatcaggacatagcgttggctacccgtgatattgctgaagagcttggcggcgaatgggctgaccgcttcctcgtgctttacggtatcgccgctcccgattcgcagcgcatcgccttctatcgccttcttgacgagttcttctgagcgggactctggggttcgaaatgaccgaccaagcgacgcccaacctgccatcacgagatttcgattccaccgccgccttctatgaaaggttgggcttcggaatcgttttccgggacgccggctggatgatcctccagcgcggggatctcatgctggagttcttcgcccaccccaacttgtttattgcagcttataatggttacaaataaagcaatagcatcacaaatttcacaaataaagcatttttttcactgcattctagttgtggtttgtccaaactcatcaatgtatcttatcatgtctgtataccgtcgacctctagctagagcttggcgtaatcatggtcatagctgtttcctgtgtgaaattgttatccgctcacaattccacacaacatacgagccggaagcataaagtgtaaagcctggggtgcctaatgagtgagctaactcacattaattgcgttgcgctcactgcccgctttccagtcgggaaacctgtcgtgccagctgcattaatgaatcggccaacgcgcggggagaggcggtttgcgtattgggcgctcttccgcttcctcgctcactgactcgctgcgctcggtcgttcggctgcggcgagcggtatcagctcactcaaaggcggtaatacggttatccacagaatcaggggataacgcaggaaagaacatgtgagcaaaaggccagcaaaaggccaggaaccgtaaaaaggccgcgttgctggcgtttttccataggctccgcccccctgacgagcatcacaaaaatcgacgctcaagtcagaggtggcgaaacccgacaggactataaagataccaggcgtttccccctggaagctccctcgtgcgctctcctgttccgaccctgccgcttaccggatacctgtccgcctttctcccttcgggaagcgtggcgctttctcaatgctcacgctgtaggtatctcagttcggtgtaggtcgttcgctccaagctgggctgtgtgcacgaaccccccgttcagcccgaccgctgcgccttatccggtaactatcgtcttgagtccaacccggtaagacacgacttatcgccactggcagcagccactggtaacaggattagcagagcgaggtatgtaggcggtgctacagagttcttgaagtggtggcctaactacggctacactagaaggacagtatttggtatctgcgctctgctgaagccagttaccttcggaaaaagagttggtagctcttgatccggcaaacaaaccaccgctggtagcggtggtttttttgtttgcaagcagcagattacgcgcagaaaaaaaggatctcaagaagatcctttgatcttttctacggggtctgacgctcagtggaacgaaaactcacgttaagggattttggtcatgagattatcaaaaaggatcttcacctagatccttttaaattaaaaatgaagttttaaatcaatctaaagtatatatgagtaaacttggtctgacagttaccaatgcttaatcagtgaggcacctatctcagcgatctgtctatttcgttcatccatagttgcctgactccccgtcgtgtagataactacgatacgggagggcttaccatctggccccagtgctgcaatgataccgcgagacccacgctcaccggctccagatttatcagcaataaaccagccagccggaagggccgagcgcagaagtggtcctgcaactttatccgcctccatccagtctattaattgttgccgggaagctagagtaagtagttcgccagttaatagtttgcgcaacgttgttgccattgctacaggcatcgtggtgtcacgctcgtcgtttggtatggcttcattcagctccggttcccaacgatcaaggcgagttacatgatcccccatgttgtgcaaaaaagcggttagctccttcggtcctccgatcgttgtcagaagtaagttggccgcagtgttatcactcatggttatggcagcactgcataattctcttactgtcatgccatccgtaagatgcttttctgtgactggtgagtactcaaccaagtcattctgagaatagtgtatgcggcgaccgagttgctc

SEQ ID NO: 213 - DNA, 6661 bp, Artificial Sequence
  Synthetic
gacggatcgggagatctcccgatcccctatggtgcactctcagtacaatctgctctgatgccgcatagttaagccagtatctgctccctgcttgtgtgttggaggtcgctgagtagtgcgcgagcaaaatttaagctacaacaaggcaaggcttgaccgacaattgcatgaagaatctgcttagggttaggcgttttgcgctgcttcgcgatgtacgggccagatatacgcgttgacattgattattgactagttattaatagtaatcaattacggggtcattagttcatagcccatatatggagttccgcgttacataacttacggtaaatggcccgcctggctgaccgcccaacgacccccgcccattgacgtcaataatgacgtatgttcccatagtaacgccaatagggactttccattgacgtcaatgggtggagtatttacggtaaactgcccacttggcagtacatcaagtgtatcatatgccaagtacgccccctattgacgtcaatgacggtaaatggcccgcctggcattatgcccagtacatgaccttatgggactttcctacttggcagtacatctacgtattagtcatcgctattaccatggtgatgcggttttggcagtacatcaatgggcgtggatagcggtttgactcacggggatttccaagtctccaccccattgacgtcaatgggagtttgttttggcaccaaaatcaacgggactttccaaaatgtcgtaacaactccgccccattgacgcaaatgggcggtaggcgtgtacggtgggaggtctatataagcagagctctctggctaactagagaacccactgcttactggcttatcgaaattaatacgactcactatagggagacccaagctggctagcgtttaaacttaagcttggtaccgagctcggccaccatgggcaacgccctgaccgagatccagatcgagaagctgaggaatttcagcgactgcatcgtgatgcacccacagatcaagacaatcttcaacgactttgatgagctgaggctgaatcgcaagtttcagtccgaccagcagtgtatgctgctgatcggcgataccggcgtgggcaagtctcacacaatcaaccactacaagaagcgggtgctggccacccagaactattccagaaatacaatgcccgtgctggtgtcccggatcagccggggcaagggcctggacgccaccctggtgcagatgctggccgatctggagctgttcggcagctcccagatcaagaagcggggctacaagaccgatctgacaaagaagctggtggagtctctgatcaaggcccaggtggagctgctgatcatcaacgagttccaggagctgatcgagtttaagtctgtgcaggagagacagcagatcgccaatggcctgaagtttatcagcgaggaggccaaggtgcctatcgtgctggtgggcatgccatgggcagcaaagatcgcagaggagccacagtgggcctctaggctggtgcggaagagaaagctggagtatttcagcctgaagaacgactccaagtactttcgccagtatctgatgggcctggccaagaagatgcctttcgatgtgccccctaagctggagagcaagaacaccacaatcgccctgtttgcagcatgcaggggagagaatcgcgccctgaagcacctgctgctggaggccctgaagctggccctgagctgtaacgagtacctggagaataagcacttcatcaccgcctatgacaagtttgatttctttaacgacaaggagaagctgaagtccaagaatcctttcaagcaggacatcaaggatatcgaaatctacgaagtgatcaagaacagcagctataacccaaatgccctggaccccgaggatatgctgacagatcgggtgtttgccatcgtgaagggctccggaaaacggacagccgacggaagcgagttcgagtcaccgaaaaagaagcgaaaagttggtggtagtggtggaagcggcgaggccagcggttccggacgggctgacgcattggacgattttgatctggatatgctgggaagtgacgccctcgatgattttgaccttgacatgcttggttcggatgcccttgatgactttgacctcgacatgctcggcagtgacgcccttgatgatttcgacctggacatgctgattaactctagatgagcggccgctcgagtctagagggcccgtttaaacccgctgatcagcctcgactgtgccttctagttgccagccatctgttgtttgcccctcccccgtgccttccttgaccctggaaggtgccactcccactgtcctttcctaataaaatgaggaaattgcatcgcattgtctgagtaggtgtcattctattctggggggtggggtggggcaggacagcaagggggaggattgggaagacaatagcaggcatgctggggatgcggtgggctctatggcttctgaggcggaaagaaccagctggggctctagggggtatccccacgcgccctgtagcggcgcattaagcgcggcgggtgtggtggttacgcgcagcgtgaccgctacacttgccagcgccctagcgcccgctcctttcgctttcttcccttcctttctcgccacgttcgccggctttccccgtcaagctctaaatcgggggctccctttagggttccgatttagtgctttacggcacctcgaccccaaaaaacttgattagggtgatggttcacgtagtgggccatcgccctgatagacggtttttcgccctttgacgttggagtccacgttctttaatagtggactcttgttccaaactggaacaacactcaaccctatctcggtctattcttttgatttataagggattttgccgatttcggcctattggttaaaaaatgagctgatttaacaaaaatttaacgcgaattaattctgtggaatgtgtgtcagttagggtgtggaaagtccccaggctccccagcaggcagaagtatgcaaagcatgcatctcaattagtcagcaaccaggtgtggaaagtccccaggctccccagcaggcagaagtatgcaaagcatgcatctcaattagtcagcaaccatagtcccgcccctaactccgcccatcccgcccctaactccgcccagttccgcccattctccgccccatggctgactaattttttttatttatgcagaggccgaggccgcctctgcctctgagctattccagaagtagtgaggaggcttttttggaggcctaggcttttgcaaaaagctcccgggagcttgtatatccattttcggatctgatcaagagacaggatgaggatcgtttcgcatgattgaacaagatggattgcacgcaggttctccggccgcttgggtggagaggctattcggctatgactgggcacaacagacaatcggctgctctgatgccgccgtgttccggctgtcagcgcaggggcgcccggttctttttgtcaagaccgacctgtccggtgccctgaatgaactgcaggacgaggcagcgcggctatcgtggctggccacgacgggcgttccttgcgcagctgtgctcgacgttgtcactgaagcgggaagggactggctgctattgggcgaagtgccggggcaggatctcctgtcatctcaccttgctcctgccgagaaagtatccatcatggctgatgcaatgcggcggctgcatacgcttgatccggctacctgcccattcgaccaccaagcgaaacatcgcatcgagcgagcacgtactcggatggaagccggtcttgtcgatcaggatgatctggacgaagagcatcaggggctcgcgccagccgaactgttcgccaggctcaaggcgcgcatgcccgacggcgaggatctcgtcgtgacccatggcgatgcctgcttgccgaatatcatggtggaaaatggccgcttttctggattcatcgactgtggccggctgggtgtggcggaccgctatcaggacatagcgttggctacccgtgatattgctgaagagcttggcggcgaatgggctgaccgcttcctcgtgctttacggtatcgccgctcccgattcgcagcgcatcgccttctatcgccttcttgacgagttcttctgagcgggactctggggttcgaaatgaccgaccaagcgacgcccaacctgccatcacgagatttcgattccaccgccgccttctatgaaaggttgggcttcggaatcgttttccgggacgccggctggatgatcctccagcgcggggatctcatgctggagttcttcgcccaccccaacttgtttattgcagcttataatggttacaaataaagcaatagcatcacaaatttcacaaataaagcatttttttcactgcattctagttgtggtttgtccaaactcatcaatgtatcttatcatgtctgtataccgtcgacctctagctagagcttggcgtaatcatggtcatagctgtttcctgtgtgaaattgttatccgctcacaattccacacaacatacgagccggaagcataaagtgtaaagcctggggtgcctaatgagtgagctaactcacattaattgcgttgcgctcactgcccgctttccagtcgggaaacctgtcgtgccagctgcattaatgaatcggccaacgcgcggggagaggcggtttgcgtattgggcgctcttccgcttcctcgctcactgactcgctgcgctcggtcgttcggctgcggcgagcggtatcagctcactcaaaggcggtaatacggttatccacagaatcaggggataacgcaggaaagaacatgtgagcaaaaggccagcaaaaggccaggaaccgtaaaaaggccgcgttgctggcgtttttccataggctccgcccccctgacgagcatcacaaaaatcgacgctcaagtcagaggtggcgaaacccgacaggactataaagataccaggcgtttccccctggaagctccctcgtgcgctctcctgttccgaccctgccgcttaccggatacctgtccgcctttctcccttcgggaagcgtggcgctttctcatagctcacgctgtaggtatctcagttcggtgtaggtcgttcgctccaagctgggctgtgtgcacgaaccccccgttcagcccgaccgctgcgccttatccggtaactatcgtcttgagtccaacccggtaagacacgacttatcgccactggcagcagccactggtaacaggattagcagagcgaggtatgtaggcggtgctacagagttcttgaagtggtggcctaactacggctacactagaagaacagtatttggtatctgcgctctgctgaagccagttaccttcggaaaaagagttggtagctcttgatccggcaaacaaaccaccgctggtagcggtttttttgtttgcaagcagcagattacgcgcagaaaaaaaggatctcaagaagatcctttgatcttttctacggggtctgacgctcagtggaacgaaaactcacgttaagggattttggtcatgagattatcaaaaaggatcttcacctagatccttttaaattaaaaatgaagttttaaatcaatctaaagtatatatgagtaaacttggtctgacagttaccaatgcttaatcagtgaggcacctatctcagcgatctgtctatttcgttcatccatagttgcctgactccccgtcgtgtagataactacgatacgggagggcttaccatctggccccagtgctgcaatgataccgcgagacccacgctcaccggctccagatttatcagcaataaaccagccagccggaagggccgagcgcagaagtggtcctgcaactttatccgcctccatccagtctattaattgttgccgggaagctagagtaagtagttcgccagttaatagtttgcgcaacgttgttgccattgctacaggcatcgtggtgtcacgctcgtcgtttggtatggcttcattcagctccggttcccaacgatcaaggcgagttacatgatcccccatgttgtgcaaaaaagcggttagctccttcggtcctccgatcgttgtcagaagtaagttggccgcagtgttatcactcatggttatggcagcactgcataattctcttactgtcatgccatccgtaagatgcttttctgtgactggtgagtactcaaccaagtcattctgagaatagtgtatgcggcgaccgagttgctcttgcccggcgtcaatacgggataataccgcgccacatagcagaactttaaaagtgctcatcattggaaaacgttcttcggggcgaaaactctcaaggatcttaccgctgttgagatccagttcgatgtaacccactcgtgcacccaactgatcttcagcatcttttactttcaccagcgtttctgggtgagcaaaaacaggaaggcaaaatgccgcaaaaaagggaataagggcgacacggaaatgttgaatactcatactcttcctttttcaatattattgaagcatttatcagggttattgtctcatgagcggatacatatttgaatgtatttagaaaaataaacaaataggggttccgcgcacatttccccgaaaagtgccacctgacgtc

SEQ ID NO: 214 - DNA, 6651 bp, Artificial Sequence
  Synthetic
gacggatcgggagatctcccgatcccctatggtgcactctcagtacaatctgctctgatgccgcatagttaagccagtatctgctccctgcttgtgtgttggaggtcgctgagtagtgcgcgagcaaaatttaagctacaacaaggcaaggcttgaccgacaattgcatgaagaatctgcttagggttaggcgttttgcgctgcttcgcgatgtacgggccagatatacgcgttgacattgattattgactagttattaatagtaatcaattacggggtcattagttcatagcccatatatggagttccgcgttacataacttacggtaaatggcccgcctggctgaccgcccaacgacccccgcccattgacgtcaataatgacgtatgttcccatagtaacgccaatagggactttccattgacgtcaatgggtggagtatttacggtaaactgcccacttggcagtacatcaagtgtatcatatgccaagtacgccccctattgacgtcaatgacggtaaatggcccgcctggcattatgcccagtacatgaccttatgggactttcctacttggcagtacatctacgtattagtcatcgctattaccatggtgatgcggttttggcagtacatcaatgggcgtggatagcggtttgactcacggggatttccaagtctccaccccattgacgtcaatgggagtttgttttggcaccaaaatcaacgggactttccaaaatgtcgtaacaactccgccccattgacgcaaatgggcggtaggcgtgtacggtgggaggtctatataagcagagctctctggctaactagagaacccactgcttactggcttatcgaaattaatacgactcactatagggagacccaagctggctagcgtttaaacttaagcttggtaccgagctcggatccgccaccatgggcaaacggacagccgacggaagcgagttcgagtcaccgaaaaagaagcgaaaagttggctccggaatgatgctgctgcagcggcccaagtcctatcctgacgagtccctggagtctttctttatcagagtggccaacaagaatggctataatgatgtgcactggtttctggtggccgtgaagagatacctgctggacatcgatccaagaaagttccagacctttcccacagacatctgctgtatcaatccatacagctccaagaagcactccatctctaggacccacgccctgcaccacctgtctcagctgaccttcaacgagcccgtggatctgctgggcatcgccctgaaccggaatcagatgcagttcagcccttccaccacagccctgatcagaggcgccgaagtgatcccaaggagcctgctgcgcaagggcgccatcccttgctgtccatgctgtctgggcgagcacggctatgcctcctaccggtggcacttctctggctacgagtattgccacgagcacgacgtgaagctgatcgagaggtgctcctgtggcgccatctacgattatagatacgcaggcctgtctggcgtgtgcaccgagtgtggcgagaacatctctgccagccaggagaatcacgagcccaaggccacaagaatcgcctcctggctggccggcgacgatgtgaagccactgcccgacgtgcctctgtcttacagatggggctttatgcactggtggagccagatcagcagcagctgcaagacccgcaacaatggcgagttcctggccttttgggagcactggcctaatagcttccacaagctgatcggcaaggagatcgacttcaactttgagtattgcgtgctgagcaagaatgacctgcgggtgaaggatatcctgggcaagatcctgttctctagcatccagctgcccgatcggaactttagaagcaatatcatcctgaaggagatgttccagtacatcgagacacacctgtgggacgataacggcaagctggccaacctgaggatgaatatgctggagatttgcgtgctgctgaactgtagccgcgagcaggtgacctccatgatcgagcagggactgctgccacctaacaggcagctgggcaagagagagatcctgatcgtgacagagtatgccttttacctgggcgacgtgtattgtctgtggctgagcgagttccagtccgatgagttcaacaggtctttttacctgagccgctggtgagcggccgctcgagtctagagggcccgtttaaacccgctgatcagcctcgactgtgccttctagttgccagccatctgttgtttgcccctcccccgtgccttccttgaccctggaaggtgccactcccactgtcctttcctaataaaatgaggaaattgcatcgcattgtctgagtaggtgtcattctattctggggggtggggtggggcaggacagcaagggggaggattgggaagacaatagcaggcatgctggggatgcggtgggctctatggcttctgaggcggaaagaaccagctggggctctagggggtatccccacgcgccctgtagcggcgcattaagcgcggcgggtgtggtggttacgcgcagcgtgaccgctacacttgccagcgccctagcgcccgctcctttcgctttcttcccttcctttctcgccacgttcgccggctttccccgtcaagctctaaatcgggggctccctttagggttccgatttagtgctttacggcacctcgaccccaaaaaacttgattagggtgatggttcacgtagtgggccatcgccctgatagacggtttttcgccctttgacgttggagtccacgttctttaatagtggactcttgttccaaactggaacaacactcaaccctatctcggtctattcttttgatttataagggattttgccgatttcggcctattggttaaaaaatgagctgatttaacaaaaatttaacgcgaattaattctgtggaatgtgtgtcagttagggtgtggaaagtccccaggctccccagcaggcagaagtatgcaaagcatgcatctcaattagtcagcaaccaggtgtggaaagtccccaggctccccagcaggcagaagtatgcaaagcatgcatctcaattagtcagcaaccatagtcccgcccctaactccgcccatcccgcccctaactccgcccagttccgcccattctccgccccatggctgactaattttttttatttatgcagaggccgaggccgcctctgcctctgagctattccagaagtagtgaggaggcttttttggaggcctaggcttttgcaaaaagctcccgggagcttgtatatccattttcggatctgatcaagagacaggatgaggatcgtttcgcatgattgaacaagatggattgcacgcaggttctccggccgcttgggtggagaggctattcggctatgactgggcacaacagacaatcggctgctctgatgccgccgtgttccggctgtcagcgcaggggcgcccggttctttttgtcaagaccgacctgtccggtgccctgaatgaactgcaggacgaggcagcgcggctatcgtggctggccacgacgggcgttccttgcgcagctgtgctcgacgttgtcactgaagcgggaagggactggctgctattgggcgaagtgccggggcaggatctcctgtcatctcaccttgctcctgccgagaaagtatccatcatggctgatgcaatgcggcggctgcatacgcttgatccggctacctgcccattcgaccaccaagcgaaacatcgcatcgagcgagcacgtactcggatggaagccggtcttgtcgatcaggatgatctggacgaagagcatcaggggctcgcgccagccgaactgttcgccaggctcaaggcgcgcatgcccgacggcgaggatctcgtcgtgacccatggcgatgcctgcttgccgaatatcatggtggaaaatggccgcttttctggattcatcgactgtggccggctgggtgtggcggaccgctatcaggacatagcgttggctacccgtgatattgctgaagagcttggcggcgaatgggctgaccgcttcctcgtgctttacggtatcgccgctcccgattcgcagcgcatcgccttctatcgccttcttgacgagttcttctgagcgggactctggggttcgaaatgaccgaccaagcgacgcccaacctgccatcacgagatttcgattccaccgccgccttctatgaaaggttgggcttcggaatcgttttccgggacgccggctggatgatcctccagcgcggggatctcatgctggagttcttcgcccaccccaacttgtttattgcagcttataatggttacaaataaagcaatagcatcacaaatttcacaaataaagcatttttttcactgcattctagttgtggtttgtccaaactcatcaatgtatcttatcatgtctgtataccgtcgacctctagctagagcttggcgtaatcatggtcatagctgtttcctgtgtgaaattgttatccgctcacaattccacacaacatacgagccggaagcataaagtgtaaagcctggggtgcctaatgagtgagctaactcacattaattgcgttgcgctcactgcccgctttccagtcgggaaacctgtcgtgccagctgcattaatgaatcggccaacgcgcggggagaggcggtttgcgtattgggcgctcttccgcttcctcgctcactgactcgctgcgctcggtcgttcggctgcggcgagcggtatcagctcactcaaaggcggtaatacggttatccacagaatcaggggataacgcaggaaagaacatgtgagcaaaaggccagcaaaaggccaggaaccgtaaaaaggccgcgttgctggcgtttttccataggctccgcccccctgacgagcatcacaaaaatcgacgctcaagtcagaggtggcgaaacccgacaggactataaagataccaggcgtttccccctggaagctccctcgtgcgctctcctgttccgaccctgccgcttaccggatacctgtccgcctttctcccttcgggaagcgtggcgctttctcatagctcacgctgtaggtatctcagttcggtgtaggtcgttcgctccaagctgggctgtgtgcacgaaccccccgttcagcccgaccgctgcgccttatccggtaactatcgtcttgagtccaacccggtaagacacgacttatcgccactggcagcagccactggtaacaggattagcagagcgaggtatgtaggcggtgctacagagttcttgaagtggtggcctaactacggctacactagaagaacagtatttggtatctgcgctctgctgaagccagttaccttcggaaaaagagttggtagctcttgatccggcaaacaaaccaccgctggtagcggtttttttgtttgcaagcagcagattacgcgcagaaaaaaaggatctcaagaagatcctttgatcttttctacggggtctgacgctcagtggaacgaaaactcacgttaagggattttggtcatgagattatcaaaaaggatcttcacctagatccttttaaattaaaaatgaagttttaaatcaatctaaagtatatatgagtaaacttggtctgacagttaccaatgcttaatcagtgaggcacctatctcagcgatctgtctatttcgttcatccatagttgcctgactccccgtcgtgtagataactacgatacgggagggcttaccatctggccccagtgctgcaatgataccgcgagacccacgctcaccggctccagatttatcagcaataaaccagccagccggaagggccgagcgcagaagtggtcctgcaactttatccgcctccatccagtctattaattgttgccgggaagctagagtaagtagttcgccagttaatagtttgcgcaacgttgttgccattgctacaggcatcgtggtgtcacgctcgtcgtttggtatggcttcattcagctccggttcccaacgatcaaggcgagttacatgatcccccatgttgtgcaaaaaagcggttagctccttcggtcctccgatcgttgtcagaagtaagttggccgcagtgttatcactcatggttatggcagcactgcataattctcttactgtcatgccatccgtaagatgcttttctgtgactggtgagtactcaaccaagtcattctgagaatagtgtatgcggcgaccgagttgctcttgcccggcgtcaatacgggataataccgcgccacatagcagaactttaaaagtgctcatcattggaaaacgttcttcggggcgaaaactctcaaggatcttaccgctgttgagatccagttcgatgtaacccactcgtgcacccaactgatcttcagcatcttttactttcaccagcgtttctgggtgagcaaaaacaggaaggcaaaatgccgcaaaaaagggaataagggcgacacggaaatgttgaatactcatactcttcctttttcaatattattgaagcatttatcagggttattgtctcatgagcggatacatatttgaatgtatttagaaaaataaacaaataggggttccgcgcacatttccccgaaaagtgccacctgacgtc

SEQ ID NO: 215 - DNA, 7383 bp, Artificial Sequence
  Synthetic
gacggatcgggagatctcccgatcccctatggtgcactctcagtacaatctgctctgatgccgcatagttaagccagtatctgctccctgcttgtgtgttggaggtcgctgagtagtgcgcgagcaaaatttaagctacaacaaggcaaggcttgaccgacaattgcatgaagaatctgcttagggttaggcgttttgcgctgcttcgcgatgtacgggccagatatacgcgttgacattgattattgactagttattaatagtaatcaattacggggtcattagttcatagcccatatatggagttccgcgttacataacttacggtaaatggcccgcctggctgaccgcccaacgacccccgcccattgacgtcaataatgacgtatgttcccatagtaacgccaatagggactttccattgacgtcaatgggtggagtatttacggtaaactgcccacttggcagtacatcaagtgtatcatatgccaagtacgccccctattgacgtcaatgacggtaaatggcccgcctggcattatgcccagtacatgaccttatgggactttcctacttggcagtacatctacgtattagtcatcgctattaccatggtgatgcggttttggcagtacatcaatgggcgtggatagcggtttgactcacggggatttccaagtctccaccccattgacgtcaatgggagtttgttttggcaccaaaatcaacgggactttccaaaatgtcgtaacaactccgccccattgacgcaaatgggcggtaggcgtgtacggtgggaggtctatataagcagagctctctggctaactagagaacccactgcttactggcttatcgaaattaatacgactcactatagggagacccaagctggctagcgtttaaacttaagcttggtaccgagctcggatccgccaccatgggcaaacggacagccgacggaagcgagttcgagtcaccgaaaaagaagcgaaaagttggctccggaatggccacactggccgagatcctggacaacaagaccgacgatctgaataaggatctgcggagagccttcagacccctgtccgcccctgtggacatctctgatacccccatcgaggccctgacaatcctggtgaatctgaccgacagagtgatcgagcagaagaacctgctggatcgccagaagtgcaaggacaagctgcgggatgagaagtggtgggccaactgtttcagaaccgtgaagtacaggcagtcccacaatcctaagtttccagacatcagagccaacggcgtgatcagggcagcaccagtgggacacctgcctgcctgcatgctgagctcctctaagctgccaaagaacagctgggcctatgccaatgacagctcccagatgaacaagtcttgcttcctgacaagcgagtttatctggaatggcgatgtgcactgtctgggacagctgctgaccgagctggagcaccccctgtggaacgtgctgagaaagctgggctgttacgtgaagacagccaagtatatctccaaggagctggccctgatcccccctctggagatcaatacctctctggtgaggaactacctggcccagatcagcctgcccaatggcgaggacagctatatcagcctgtcccctgtggtgtctcagagcatgcaggaggattgctaccaggtgctgagcgagcactatcgcttctccgccatcaccaggttttctcgcgccaccaacatgggcacactggccatgtcttgtggcggcaagtttaagatgatcagaagcctgccacccatcgagaagtaccagcaccaccacctggactccgtgaattggctgacaaagcggtctgtgagagccatcagggattataccgagtctagcgtgtgggtcatctcccctaacaagctggccctgagaaagaagtctatcatcggcgacatcaagatgatgctgagccagtggctgaggaccacaccaacacacgaggagaagctggacatccgcaagctgacagagcggttcaatgtggatctggccaagaccaagtttgccaacagatacgcctatgatcctctgctgacccagctgatctacaattgcatcggctccatcatccactcctctccacagtacgcccccaagtgtgagggcaatgacgataagtatctgctgctgccaaacctgcgcatctccggcgcctctgccatgaatacatccgtgtctatcggcatcccctctatgatggccttctatggctttgtgcacgccttccagcggaacgtgcagaccgccaacccaaatttcaagatcgagagctttgccgtgtgcatccacaacatccacgtggagaatagaggcctgacaagggagtgggtgcctaacaccaagggacagatcaccgcaccagcaacacgcgacgattggcagtgcgacgtggccgtgtccctgatcctgcggtgtagccactactcccagctgatcccccgggacttcatcaggctgctgccaggaaggatcgcccggggcaaggtgaccgtgagcatctccgacatcaagcacctgggccgctgtctgagcctggccgatgccatcaaggccatccctgtggagacaggccggtggctgagcctgaacaatgaggtgaccctgaacagcatccaggacgtgatcgatgagctgaagaacaataagctgcagacagtgaactgcatcggctaccacagactggagaccccctgtgagaagaggggcagcctgcacggctataagcacgccttcgtggagacaatcctgggcatcatcaagtttctgaccatcagcgagaacacaaatccttcccagtacttctggcagtaccactatagcaagcagggccctatcctgctgccaaggtctgtgagcgacgagacctcctgagcggccgctcgagtctagagggcccgtttaaacccgctgatcagcctcgactgtgccttctagttgccagccatctgttgtttgcccctcccccgtgccttccttgaccctggaaggtgccactcccactgtcctttcctaataaaatgaggaaattgcatcgcattgtctgagtaggtgtcattctattctggggggtggggtggggcaggacagcaagggggaggattgggaagacaatagcaggcatgctggggatgcggtgggctctatggcttctgaggcggaaagaaccagctggggctctagggggtatccccacgcgccctgtagcggcgcattaagcgcggcgggtgtggtggttacgcgcagcgtgaccgctacacttgccagcgccctagcgcccgctcctttcgctttcttcccttcctttctcgccacgttcgccggctttccccgtcaagctctaaatcgggggctccctttagggttccgatttagtgctttacggcacctcgaccccaaaaaacttgattagggtgatggttcacgtagtgggccatcgccctgatagacggtttttcgccctttgacgttggagtccacgttctttaatagtggactcttgttccaaactggaacaacactcaaccctatctcggtctattcttttgatttataagggattttgccgatttcggcctattggttaaaaaatgagctgatttaacaaaaatttaacgcgaattaattctgtggaatgtgtgtcagttagggtgtggaaagtccccaggctccccagcaggcagaagtatgcaaagcatgcatctcaattagtcagcaaccaggtgtggaaagtccccaggctccccagcaggcagaagtatgcaaagcatgcatctcaattagtcagcaaccatagtcccgcccctaactccgcccatcccgcccctaactccgcccagttccgcccattctccgccccatggctgactaattttttttatttatgcagaggccgaggccgcctctgcctctgagctattccagaagtagtgaggaggcttttttggaggcctaggcttttgcaaaaagctcccgggagcttgtatatccattttcggatctgatcaagagacaggatgaggatcgtttcgcatgattgaacaagatggattgcacgcaggttctccggccgcttgggtggagaggctattcggctatgactgggcacaacagacaatcggctgctctgatgccgccgtgttccggctgtcagcgcaggggcgcccggttctttttgtcaagaccgacctgtccggtgccctgaatgaactgcaggacgaggcagcgcggctatcgtggctggccacgacgggcgttccttgcgcagctgtgctcgacgttgtcactgaagcgggaagggactggctgctattgggcgaagtgccggggcaggatctcctgtcatctcaccttgctcctgccgagaaagtatccatcatggctgatgcaatgcggcggctgcatacgcttgatccggctacctgcccattcgaccaccaagcgaaacatcgcatcgagcgagcacgtactcggatggaagccggtcttgtcgatcaggatgatctggacgaagagcatcaggggctcgcgccagccgaactgttcgccaggctcaaggcgcgcatgcccgacggcgaggatctcgtcgtgacccatggcgatgcctgcttgccgaatatcatggtggaaaatggccgcttttctggattcatcgactgtggccggctgggtgtggcggaccgctatcaggacatagcgttggctacccgtgatattgctgaagagcttggcggcgaatgggctgaccgcttcctcgtgctttacggtatcgccgctcccgattcgcagcgcatcgccttctatcgccttcttgacgagttcttctgagcgggactctggggttcgaaatgaccgaccaagcgacgcccaacctgccatcacgagatttcgattccaccgccgccttctatgaaaggttgggcttcggaatcgttttccgggacgccggctggatgatcctccagcgcggggatctcatgctggagttcttcgcccaccccaacttgtttattgcagcttataatggttacaaataaagcaatagcatcacaaatttcacaaataaagcatttttttcactgcattctagttgtggtttgtccaaactcatcaatgtatcttatcatgtctgtataccgtcgacctctagctagagcttggcgtaatcatggtcatagctgtttcctgtgtgaaattgttatccgctcacaattccacacaacatacgagccggaagcataaagtgtaaagcctggggtgcctaatgagtgagctaactcacattaattgcgttgcgctcactgcccgctttccagtcgggaaacctgtcgtgccagctgcattaatgaatcggccaacgcgcggggagaggcggtttgcgtattgggcgctcttccgcttcctcgctcactgactcgctgcgctcggtcgttcggctgcggcgagcggtatcagctcactcaaaggcggtaatacggttatccacagaatcaggggataacgcaggaaagaacatgtgagcaaaaggccagcaaaaggccaggaaccgtaaaaaggccgcgttgctggcgtttttccataggctccgcccccctgacgagcatcacaaaaatcgacgctcaagtcagaggtggcgaaacccgacaggactataaagataccaggcgtttccccctggaagctccctcgtgcgctctcctgttccgaccctgccgcttaccggatacctgtccgcctttctcccttcgggaagcgtggcgctttctcatagctcacgctgtaggtatctcagttcggtgtaggtcgttcgctccaagctgggctgtgtgcacgaaccccccgttcagcccgaccgctgcgccttatccggtaactatcgtcttgagtccaacccggtaagacacgacttatcgccactggcagcagccactggtaacaggattagcagagcgaggtatgtaggcggtgctacagagttcttgaagtggtggcctaactacggctacactagaagaacagtatttggtatctgcgctctgctgaagccagttaccttcggaaaaagagttggtagctcttgatccggcaaacaaaccaccgctggtagcggtttttttgtttgcaagcagcagattacgcgcagaaaaaaaggatctcaagaagatcctttgatcttttctacggggtctgacgctcagtggaacgaaaactcacgttaagggattttggtcatgagattatcaaaaaggatcttcacctagatccttttaaattaaaaatgaagttttaaatcaatctaaagtatatatgagtaaacttggtctgacagttaccaatgcttaatcagtgaggcacctatctcagcgatctgtctatttcgttcatccatagttgcctgactccccgtcgtgtagataactacgatacgggagggcttaccatctggccccagtgctgcaatgataccgcgagacccacgctcaccggctccagatttatcagcaataaaccagccagccggaagggccgagcgcagaagtggtcctgcaactttatccgcctccatccagtctattaattgttgccgggaagctagagtaagtagttcgccagttaatagtttgcgcaacgttgttgccattgctacaggcatcgtggtgtcacgctcgtcgtttggtatggcttcattcagctccggttcccaacgatcaaggcgagttacatgatcccccatgttgtgcaaaaaagcggttagctccttcggtcctccgatcgttgtcagaagtaagttggccgcagtgttatcactcatggttatggcagcactgcataattctcttactgtcatgccatccgtaagatgcttttctgtgactggtgagtactcaaccaagtcattctgagaatagtgtatgcggcgaccgagttgctcttgcccggcgtcaatacgggataataccgcgccacatagcagaactttaaaagtgctcatcattggaaaacgttcttcggggcgaaaactctcaaggatcttaccgctgttgagatccagttcgatgtaacccactcgtgcacccaactgatcttcagcatcttttactttcaccagcgtttctgggtgagcaaaaacaggaaggcaaaatgccgcaaaaaagggaataagggcgacacggaaatgttgaatactcatactcttcctttttcaatattattgaagcatttatcagggttattgtctcatgagcggatacatatttgaatgtatttagaaaaataaacaaataggggttccgcgcacatttccccgaaaagtgccacctgacgtc

SEQ ID NO: 216 - DNA, 6588 bp, Artificial Sequence
  Synthetic
gacggatcgggagatctcccgatcccctatggtgcactctcagtacaatctgctctgatgccgcatagttaagccagtatctgctccctgcttgtgtgttggaggtcgctgagtagtgcgcgagcaaaatttaagctacaacaaggcaaggcttgaccgacaattgcatgaagaatctgcttagggttaggcgttttgcgctgcttcgcgatgtacgggccagatatacgcgttgacattgattattgactagttattaatagtaatcaattacggggtcattagttcatagcccatatatggagttccgcgttacataacttacggtaaatggcccgcctggctgaccgcccaacgacccccgcccattgacgtcaataatgacgtatgttcccatagtaacgccaatagggactttccattgacgtcaatgggtggagtatttacggtaaactgcccacttggcagtacatcaagtgtatcatatgccaagtacgccccctattgacgtcaatgacggtaaatggcccgcctggcattatgcccagtacatgaccttatgggactttcctacttggcagtacatctacgtattagtcatcgctattaccatggtgatgcggttttggcagtacatcaatgggcgtggatagcggtttgactcacggggatttccaagtctccaccccattgacgtcaatgggagtttgttttggcaccaaaatcaacgggactttccaaaatgtcgtaacaactccgccccattgacgcaaatgggcggtaggcgtgtacggtgggaggtctatataagcagagctctctggctaactagagaacccactgcttactggcttatcgaaattaatacgactcactatagggagacccaagctggctagcgtttaaacttaagcttggtaccgagctcggatccgccaccatgggcaaacggacagccgacggaagcgagttcgagtcaccgaaaaagaagcgaaaagttggctccggaatgaagatccagacccctgccaacacattcggcaatatcaccatccggtccaaggtgagattctactttcccggcgcctatcctatgaagctgccaaacggcctgtcctacatgaagtctatcgaggccagcgacgtgatctttctggtgaattggccagatggcaggaagacccccctgccttatacatctcgcgtggccctgggaatgaaggagggctccaagtctgcctacaaggacgatggccagatcgacgccgatgtgaccgcctattctctggcccagggcaaccctcacgagatcgacttctgctgcgtgccatacggcgccgagagcatcgagtgcgagttcagcgtgtcctttgccagctccctgaggaagcccttcaagtgttccgatcccgaggtgaagcgcacactggtgcagctgatcaagctgtatgaggagaaagtgggctgggaggagctggccaataggttcctggagaacatctgcaatggcaggtggctgtggcgcaacaatgagtgtacctactctacaagcatcggcatcaagccatggccctgggaggacgagaaggccatcagcccattccacgatatcagaaagaactatgccggcaccaatcactttagagaccacaaggactgggataacctgatcaagctgatcacagatgccttcagccagcccaatggcctgtgcatcttcgaggtgtccgccacctttcggctgggcacaaacgcccctatctacccatcccaggtgtttaaggactctgtgaagggcgagaagaatagaatctaccagtctaccgacgtggatggcgagtctagccctatcctgggctgctataagaccggcgccgccatcgccacaatcgacgattggtatcccgacgccgataagcctatcagaatcagccactatggcgcccaccgggaggacgtgtactgttatagacaccccaacaccggcaaggacctgttcacactgctggagaaggccgatcagtacctggagcagctgcaggcaaccgacgtgctgcctgatgagatgatcaacgatctgcactttatcgtggccaatctgatcaagggcggcctgctgcagcagaagggcacatgagcggccgctcgagtctagagggcccgtttaaacccgctgatcagcctcgactgtgccttctagttgccagccatctgttgtttgcccctcccccgtgccttccttgaccctggaaggtgccactcccactgtcctttcctaataaaatgaggaaattgcatcgcattgtctgagtaggtgtcattctattctggggggtggggtggggcaggacagcaagggggaggattgggaagacaatagcaggcatgctggggatgcggtgggctctatggcttctgaggcggaaagaaccagctggggctctagggggtatccccacgcgccctgtagcggcgcattaagcgcggcgggtgtggtggttacgcgcagcgtgaccgctacacttgccagcgccctagcgcccgctcctttcgctttcttcccttcctttctcgccacgttcgccggctttccccgtcaagctctaaatcgggggctccctttagggttccgatttagtgctttacggcacctcgaccccaaaaaacttgattagggtgatggttcacgtagtgggccatcgccctgatagacggtttttcgccctttgacgttggagtccacgttctttaatagtggactcttgttccaaactggaacaacactcaaccctatctcggtctattcttttgatttataagggattttgccgatttcggcctattggttaaaaaatgagctgatttaacaaaaatttaacgcgaattaattctgtggaatgtgtgtcagttagggtgtggaaagtccccaggctccccagcaggcagaagtatgcaaagcatgcatctcaattagtcagcaaccaggtgtggaaagtccccaggctccccagcaggcagaagtatgcaaagcatgcatctcaattagtcagcaaccatagtcccgcccctaactccgcccatcccgcccctaactccgcccagttccgcccattctccgccccatggctgactaattttttttatttatgcagaggccgaggccgcctctgcctctgagctattccagaagtagtgaggaggcttttttggaggcctaggcttttgcaaaaagctcccgggagcttgtatatccattttcggatctgatcaagagacaggatgaggatcgtttcgcatgattgaacaagatggattgcacgcaggttctccggccgcttgggtggagaggctattcggctatgactgggcacaacagacaatcggctgctctgatgccgccgtgttccggctgtcagcgcaggggcgcccggttctttttgtcaagaccgacctgtccggtgccctgaatgaactgcaggacgaggcagcgcggctatcgtggctggccacgacgggcgttccttgcgcagctgtgctcgacgttgtcactgaagcgggaagggactggctgctattgggcgaagtgccggggcaggatctcctgtcatctcaccttgctcctgccgagaaagtatccatcatggctgatgcaatgcggcggctgcatacgcttgatccggctacctgcccattcgaccaccaagcgaaacatcgcatcgagcgagcacgtactcggatggaagccggtcttgtcgatcaggatgatctggacgaagagcatcaggggctcgcgccagccgaactgttcgccaggctcaaggcgcgcatgcccgacggcgaggatctcgtcgtgacccatggcgatgcctgcttgccgaatatcatggtggaaaatggccgcttttctggattcatcgactgtggccggctgggtgtggcggaccgctatcaggacatagcgttggctacccgtgatattgctgaagagcttggcggcgaatgggctgaccgcttcctcgtgctttacggtatcgccgctcccgattcgcagcgcatcgccttctatcgccttcttgacgagttcttctgagcgggactctggggttcgaaatgaccgaccaagcgacgcccaacctgccatcacgagatttcgattccaccgccgccttctatgaaaggttgggcttcggaatcgttttccgggacgccggctggatgatcctccagcgcggggatctcatgctggagttcttcgcccaccccaacttgtttattgcagcttataatggttacaaataaagcaatagcatcacaaatttcacaaataaagcatttttttcactgcattctagttgtggtttgtccaaactcatcaatgtatcttatcatgtctgtataccgtcgacctctagctagagcttggcgtaatcatggtcatagctgtttcctgtgtgaaattgttatccgctcacaattccacacaacatacgagccggaagcataaagtgtaaagcctggggtgcctaatgagtgagctaactcacattaattgcgttgcgctcactgcccgctttccagtcgggaaacctgtcgtgccagctgcattaatgaatcggccaacgcgcggggagaggcggtttgcgtattgggcgctcttccgcttcctcgctcactgactcgctgcgctcggtcgttcggctgcggcgagcggtatcagctcactcaaaggcggtaatacggttatccacagaatcaggggataacgcaggaaagaacatgtgagcaaaaggccagcaaaaggccaggaaccgtaaaaaggccgcgttgctggcgtttttccataggctccgcccccctgacgagcatcacaaaaatcgacgctcaagtcagaggtggcgaaacccgacaggactataaagataccaggcgtttccccctggaagctccctcgtgcgctctcctgttccgaccctgccgcttaccggatacctgtccgcctttctcccttcgggaagcgtggcgctttctcatagctcacgctgtaggtatctcagttcggtgtaggtcgttcgctccaagctgggctgtgtgcacgaaccccccgttcagcccgaccgctgcgccttatccggtaactatcgtcttgagtccaacccggtaagacacgacttatcgccactggcagcagccactggtaacaggattagcagagcgaggtatgtaggcggtgctacagagttcttgaagtggtggcctaactacggctacactagaagaacagtatttggtatctgcgctctgctgaagccagttaccttcggaaaaagagttggtagctcttgatccggcaaacaaaccaccgctggtagcggtttttttgtttgcaagcagcagattacgcgcagaaaaaaaggatctcaagaagatcctttgatcttttctacggggtctgacgctcagtggaacgaaaactcacgttaagggattttggtcatgagattatcaaaaaggatcttcacctagatccttttaaattaaaaatgaagttttaaatcaatctaaagtatatatgagtaaacttggtctgacagttaccaatgcttaatcagtgaggcacctatctcagcgatctgtctatttcgttcatccatagttgcctgactccccgtcgtgtagataactacgatacgggagggcttaccatctggccccagtgctgcaatgataccgcgagacccacgctcaccggctccagatttatcagcaataaaccagccagccggaagggccgagcgcagaagtggtcctgcaactttatccgcctccatccagtctattaattgttgccgggaagctagagtaagtagttcgccagttaatagtttgcgcaacgttgttgccattgctacaggcatcgtggtgtcacgctcgtcgtttggtatggcttcattcagctccggttcccaacgatcaaggcgagttacatgatcccccatgttgtgcaaaaaagcggttagctccttcggtcctccgatcgttgtcagaagtaagttggccgcagtgttatcactcatggttatggcagcactgcataattctcttactgtcatgccatccgtaagatgcttttctgtgactggtgagtactcaaccaagtcattctgagaatagtgtatgcggcgaccgagttgctcttgcccggcgtcaatacgggataataccgcgccacatagcagaactttaaaagtgctcatcattggaaaacgttcttcggggcgaaaactctcaaggatcttaccgctgttgagatccagttcgatgtaacccactcgtgcacccaactgatcttcagcatcttttactttcaccagcgtttctgggtgagcaaaaacaggaaggcaaaatgccgcaaaaaagggaataagggcgacacggaaatgttgaatactcatactcttcctttttcaatattattgaagcatttatcagggttattgtctcatgagcggatacatatttgaatgtatttagaaaaataaacaaataggggttccgcgcacatttccccgaaaagtgccacctgacgtc

SEQ ID NO: 217 - DNA, 6057 bp, Artificial Sequence
  Synthetic
gacggatcgggagatctcccgatcccctatggtgcactctcagtacaatctgctctgatgccgcatagttaagccagtatctgctccctgcttgtgtgttggaggtcgctgagtagtgcgcgagcaaaatttaagctacaacaaggcaaggcttgaccgacaattgcatgaagaatctgcttagggttaggcgttttgcgctgcttcgcgatgtacgggccagatatacgcgttgacattgattattgactagttattaatagtaatcaattacggggtcattagttcatagcccatatatggagttccgcgttacataacttacggtaaatggcccgcctggctgaccgcccaacgacccccgcccattgacgtcaataatgacgtatgttcccatagtaacgccaatagggactttccattgacgtcaatgggtggagtatttacggtaaactgcccacttggcagtacatcaagtgtatcatatgccaagtacgccccctattgacgtcaatgacggtaaatggcccgcctggcattatgcccagtacatgaccttatgggactttcctacttggcagtacatctacgtattagtcatcgctattaccatggtgatgcggttttggcagtacatcaatgggcgtggatagcggtttgactcacggggatttccaagtctccaccccattgacgtcaatgggagtttgttttggcaccaaaatcaacgggactttccaaaatgtcgtaacaactccgccccattgacgcaaatgggcggtaggcgtgtacggtgggaggtctatataagcagagctctctggctaactagagaacccactgcttactggcttatcgaaattaatacgactcactatagggagacccaagctggctagcgtttaaacttaagcttggtaccgagctcggatccgccaccatgggcaaacggacagccgacggaagcgagttcgagtcaccgaaaaagaagcgaaaagttggctccggaatggactggcactacagaaccatcacatttctgcctgagtaccggaacaacgaggccatcgccgccaagtgtatcaaggaactgcacagattcaactacaaatacgagacaagaagcattggagtgtccttcccactgtggggacaggagacagtgggcagaaagatcacctttgtgtctaccaacaagatggaactcgacttcctgatcagcagaagatacttcgtgcagatgaccaagctgggctactttagcatcagtacaacccagaccgtgcctgatgattgcagctatgtgctgttcaagcgggcccactctatcgacaagggcacaagcgccggaagagctagagagctgaagagactggaaaggcgggctctggaacggggcgaaatcttcgaccccatcgcctacagcaagaccaccagccacgccttccagagctaccacagcctggaagaggactcctctagcggcaataaattcagactgaacatccaaatgaaagagcggtctggcaccgtcggcaccggcaagttcagctcctacggcctgggaaataccgacaacagcctgcaggtggtgcccctgatctgagcggccgctcgagtctagagggcccgtttaaacccgctgatcagcctcgactgtgccttctagttgccagccatctgttgtttgcccctcccccgtgccttccttgaccctggaaggtgccactcccactgtcctttcctaataaaatgaggaaattgcatcgcattgtctgagtaggtgtcattctattctggggggtggggtggggcaggacagcaagggggaggattgggaagacaatagcaggcatgctggggatgcggtgggctctatggcttctgaggcggaaagaaccagctggggctctagggggtatccccacgcgccctgtagcggcgcattaagcgcggcgggtgtggtggttacgcgcagcgtgaccgctacacttgccagcgccctagcgcccgctcctttcgctttcttcccttcctttctcgccacgttcgccggctttccccgtcaagctctaaatcgggggctccctttagggttccgatttagtgctttacggcacctcgaccccaaaaaacttgattagggtgatggttcacgtagtgggccatcgccctgatagacggtttttcgccctttgacgttggagtccacgttctttaatagtggactcttgttccaaactggaacaacactcaaccctatctcggtctattcttttgatttataagggattttgccgatttcggcctattggttaaaaaatgagctgatttaacaaaaatttaacgcgaattaattctgtggaatgtgtgtcagttagggtgtggaaagtccccaggctccccagcaggcagaagtatgcaaagcatgcatctcaattagtcagcaaccaggtgtggaaagtccccaggctccccagcaggcagaagtatgcaaagcatgcatctcaattagtcagcaaccatagtcccgcccctaactccgcccatcccgcccctaactccgcccagttccgcccattctccgccccatggctgactaattttttttatttatgcagaggccgaggccgcctctgcctctgagctattccagaagtagtgaggaggcttttttggaggcctaggcttttgcaaaaagctcccgggagcttgtatatccattttcggatctgatcaagagacaggatgaggatcgtttcgcatgattgaacaagatggattgcacgcaggttctccggccgcttgggtggagaggctattcggctatgactgggcacaacagacaatcggctgctctgatgccgccgtgttccggctgtcagcgcaggggcgcccggttctttttgtcaagaccgacctgtccggtgccctgaatgaactgcaggacgaggcagcgcggctatcgtggctggccacgacgggcgttccttgcgcagctgtgctcgacgttgtcactgaagcgggaagggactggctgctattgggcgaagtgccggggcaggatctcctgtcatctcaccttgctcctgccgagaaagtatccatcatggctgatgcaatgcggcggctgcatacgcttgatccggctacctgcccattcgaccaccaagcgaaacatcgcatcgagcgagcacgtactcggatggaagccggtcttgtcgatcaggatgatctggacgaagagcatcaggggctcgcgccagccgaactgttcgccaggctcaaggcgcgcatgcccgacggcgaggatctcgtcgtgacccatggcgatgcctgcttgccgaatatcatggtggaaaatggccgcttttctggattcatcgactgtggccggctgggtgtggcggaccgctatcaggacatagcgttggctacccgtgatattgctgaagagcttggcggcgaatgggctgaccgcttcctcgtgctttacggtatcgccgctcccgattcgcagcgcatcgccttctatcgccttcttgacgagttcttctgagcgggactctggggttcgaaatgaccgaccaagcgacgcccaacctgccatcacgagatttcgattccaccgccgccttctatgaaaggttgggcttcggaatcgttttccgggacgccggctggatgatcctccagcgcggggatctcatgctggagttcttcgcccaccccaacttgtttattgcagcttataatggttacaaataaagcaatagcatcacaaatttcacaaataaagcatttttttcactgcattctagttgtggtttgtccaaactcatcaatgtatcttatcatgtctgtataccgtcgacctctagctagagcttggcgtaatcatggtcatagctgtttcctgtgtgaaattgttatccgctcacaattccacacaacatacgagccggaagcataaagtgtaaagcctggggtgcctaatgagtgagctaactcacattaattgcgttgcgctcactgcccgctttccagtcgggaaacctgtcgtgccagctgcattaatgaatcggccaacgcgcggggagaggcggtttgcgtattgggcgctcttccgcttcctcgctcactgactcgctgcgctcggtcgttcggctgcggcgagcggtatcagctcactcaaaggcggtaatacggttatccacagaatcaggggataacgcaggaaagaacatgtgagcaaaaggccagcaaaaggccaggaaccgtaaaaaggccgcgttgctggcgtttttccataggctccgcccccctgacgagcatcacaaaaatcgacgctcaagtcagaggtggcgaaacccgacaggactataaagataccaggcgtttccccctggaagctccctcgtgcgctctcctgttccgaccctgccgcttaccggatacctgtccgcctttctcccttcgggaagcgtggcgctttctcatagctcacgctgtaggtatctcagttcggtgtaggtcgttcgctccaagctgggctgtgtgcacgaaccccccgttcagcccgaccgctgcgccttatccggtaactatcgtcttgagtccaacccggtaagacacgacttatcgccactggcagcagccactggtaacaggattagcagagcgaggtatgtaggcggtgctacagagttcttgaagtggtggcctaactacggctacactagaagaacagtatttggtatctgcgctctgctgaagccagttaccttcggaaaaagagttggtagctcttgatccggcaaacaaaccaccgctggtagcggtttttttgtttgcaagcagcagattacgcgcagaaaaaaaggatctcaagaagatcctttgatcttttctacggggtctgacgctcagtggaacgaaaactcacgttaagggattttggtcatgagattatcaaaaaggatcttcacctagatccttttaaattaaaaatgaagttttaaatcaatctaaagtatatatgagtaaacttggtctgacagttaccaatgcttaatcagtgaggcacctatctcagcgatctgtctatttcgttcatccatagttgcctgactccccgtcgtgtagataactacgatacgggagggcttaccatctggccccagtgctgcaatgataccgcgagacccacgctcaccggctccagatttatcagcaataaaccagccagccggaagggccgagcgcagaagtggtcctgcaactttatccgcctccatccagtctattaattgttgccgggaagctagagtaagtagttcgccagttaatagtttgcgcaacgttgttgccattgctacaggcatcgtggtgtcacgctcgtcgtttggtatggcttcattcagctccggttcccaacgatcaaggcgagttacatgatcccccatgttgtgcaaaaaagcggttagctccttcggtcctccgatcgttgtcagaagtaagttggccgcagtgttatcactcatggttatggcagcactgcataattctcttactgtcatgccatccgtaagatgcttttctgtgactggtgagtactcaaccaagtcattctgagaatagtgtatgcggcgaccgagttgctcttgcccggcgtcaatacgggataataccgcgccacatagcagaactttaaaagtgctcatcattggaaaacgttcttcggggcgaaaactctcaaggatcttaccgctgttgagatccagttcgatgtaacccactcgtgcacccaactgatcttcagcatcttttactttcaccagcgtttctgggtgagcaaaaacaggaaggcaaaatgccgcaaaaaagggaataagggcgacacggaaatgttgaatactcatactcttcctttttcaatattattgaagcatttatcagggttattgtctcatgagcggatacatatttgaatgtatttagaaaaataaacaaataggggttccgcgcacatttccccgaaaagtgccacctgacgtc

SEQ ID NO: 218 - DNA, 6414 bp, Artificial Sequence
  Synthetic
gacggatcgggagatctcccgatcccctatggtgcactctcagtacaatctgctctgatgccgcatagttaagccagtatctgctccctgcttgtgtgttggaggtcgctgagtagtgcgcgagcaaaatttaagctacaacaaggcaaggcttgaccgacaattgcatgaagaatctgcttagggttaggcgttttgcgctgcttcgcgatgtacgggccagatatacgcgttgacattgattattgactagttattaatagtaatcaattacggggtcattagttcatagcccatatatggagttccgcgttacataacttacggtaaatggcccgcctggctgaccgcccaacgacccccgcccattgacgtcaataatgacgtatgttcccatagtaacgccaatagggactttccattgacgtcaatgggtggagtatttacggtaaactgcccacttggcagtacatcaagtgtatcatatgccaagtacgccccctattgacgtcaatgacggtaaatggcccgcctggcattatgcccagtacatgaccttatgggactttcctacttggcagtacatctacgtattagtcatcgctattaccatggtgatgcggttttggcagtacatcaatgggcgtggatagcggtttgactcacggggatttccaagtctccaccccattgacgtcaatgggagtttgttttggcaccaaaatcaacgggactttccaaaatgtcgtaacaactccgccccattgacgcaaatgggcggtaggcgtgtacggtgggaggtctatataagcagagctctctggctaactagagaacccactgcttactggcttatcgaaattaatacgactcactatagggagacccaagctggctagcgtttaaacttaagcttggtaccgagctcggatccgccaccatgggcaaacggacagccgacggaagcgagttcgagtcaccgaaaaagaagcgaaaagttggctccggaatgaaccacttcgccagagccccccaccagcaggtgaagagcatctttatctctaatagccagatcgacgagatcctgtccgatatcgaggagtgcagagaggagagcgacggcatctccgagcctgagtgtctgatcgtggtgggcgattccggctctggcaagaccacaatcatcgacaagtacctggtggataacccaaggatggaggccaatgatggctctatcatccccatcctgttcaccagcctgccagccaacgccaatccagtgacagcctccgagcgcctgctgagctccatgggcgaccccctggccttttctcacggcaaggaccccgccgagctgatgaagatcgtgaacgacctgctgcgggagtgcagagtggagctgatcatcatcgatgagttccagcacatgatcgaccggaagtccaaggatgtgctgcactctaccgccgactggctgaagatgatcatcatcgattccaagatccctgtggtgctgtttggcatgccatattctacagagatcctgagggtgaacaatcagctgaggggccgcttcgagtctcagcaccacctgaagccttttcgggtgaaggacaccagcgagctgatcagatacaagaccttcatgacaatgctggatgccgccctgccatttctggaggagtctggcctggccagcgaggacatcatgaagagggtgtatatcttcagcaagggcaacatgcgcctgatccggcggctgatcaacaaggccgccaagttcgccctgctggagaatgccccttgcatctccctgaagcactttgccagggccgcaccaaaggtgagccgcgacgcctgtaagtccttcaacccctttgacaccgatacaaagaagctgaagatcatcgagccccctgaggacgtgggctgggagaattacctggccgccaagggcgattgagcggccgctcgagtctagagggcccgtttaaacccgctgatcagcctcgactgtgccttctagttgccagccatctgttgtttgcccctcccccgtgccttccttgaccctggaaggtgccactcccactgtcctttcctaataaaatgaggaaattgcatcgcattgtctgagtaggtgtcattctattctggggggtggggtggggcaggacagcaagggggaggattgggaagacaatagcaggcatgctggggatgcggtgggctctatggcttctgaggcggaaagaaccagctggggctctagggggtatccccacgcgccctgtagcggcgcattaagcgcggcgggtgtggtggttacgcgcagcgtgaccgctacacttgccagcgccctagcgcccgctcctttcgctttcttcccttcctttctcgccacgttcgccggctttccccgtcaagctctaaatcgggggctccctttagggttccgatttagtgctttacggcacctcgaccccaaaaaacttgattagggtgatggttcacgtagtgggccatcgccctgatagacggtttttcgccctttgacgttggagtccacgttctttaatagtggactcttgttccaaactggaacaacactcaaccctatctcggtctattcttttgatttataagggattttgccgatttcggcctattggttaaaaaatgagctgatttaacaaaaatttaacgcgaattaattctgtggaatgtgtgtcagttagggtgtggaaagtccccaggctccccagcaggcagaagtatgcaaagcatgcatctcaattagtcagcaaccaggtgtggaaagtccccaggctccccagcaggcagaagtatgcaaagcatgcatctcaattagtcagcaaccatagtcccgcccctaactccgcccatcccgcccctaactccgcccagttccgcccattctccgccccatggctgactaattttttttatttatgcagaggccgaggccgcctctgcctctgagctattccagaagtagtgaggaggcttttttggaggcctaggcttttgcaaaaagctcccgggagcttgtatatccattttcggatctgatcaagagacaggatgaggatcgtttcgcatgattgaacaagatggattgcacgcaggttctccggccgcttgggtggagaggctattcggctatgactgggcacaacagacaatcggctgctctgatgccgccgtgttccggctgtcagcgcaggggcgcccggttctttttgtcaagaccgacctgtccggtgccctgaatgaactgcaggacgaggcagcgcggctatcgtggctggccacgacgggcgttccttgcgcagctgtgctcgacgttgtcactgaagcgggaagggactggctgctattgggcgaagtgccggggcaggatctcctgtcatctcaccttgctcctgccgagaaagtatccatcatggctgatgcaatgcggcggctgcatacgcttgatccggctacctgcccattcgaccaccaagcgaaacatcgcatcgagcgagcacgtactcggatggaagccggtcttgtcgatcaggatgatctggacgaagagcatcaggggctcgcgccagccgaactgttcgccaggctcaaggcgcgcatgcccgacggcgaggatctcgtcgtgacccatggcgatgcctgcttgccgaatatcatggtggaaaatggccgcttttctggattcatcgactgtggccggctgggtgtggcggaccgctatcaggacatagcgttggctacccgtgatattgctgaagagcttggcggcgaatgggctgaccgcttcctcgtgctttacggtatcgccgctcccgattcgcagcgcatcgccttctatcgccttcttgacgagttcttctgagcgggactctggggttcgaaatgaccgaccaagcgacgcccaacctgccatcacgagatttcgattccaccgccgccttctatgaaaggttgggcttcggaatcgttttccgggacgccggctggatgatcctccagcgcggggatctcatgctggagttcttcgcccaccccaacttgtttattgcagcttataatggttacaaataaagcaatagcatcacaaatttcacaaataaagcatttttttcactgcattctagttgtggtttgtccaaactcatcaatgtatcttatcatgtctgtataccgtcgacctctagctagagcttggcgtaatcatggtcatagctgtttcctgtgtgaaattgttatccgctcacaattccacacaacatacgagccggaagcataaagtgtaaagcctggggtgcctaatgagtgagctaactcacattaattgcgttgcgctcactgcccgctttccagtcgggaaacctgtcgtgccagctgcattaatgaatcggccaacgcgcggggagaggcggtttgcgtattgggcgctcttccgcttcctcgctcactgactcgctgcgctcggtcgttcggctgcggcgagcggtatcagctcactcaaaggcggtaatacggttatccacagaatcaggggataacgcaggaaagaacatgtgagcaaaaggccagcaaaaggccaggaaccgtaaaaaggccgcgttgctggcgtttttccataggctccgcccccctgacgagcatcacaaaaatcgacgctcaagtcagaggtggcgaaacccgacaggactataaagataccaggcgtttccccctggaagctccctcgtgcgctctcctgttccgaccctgccgcttaccggatacctgtccgcctttctcccttcgggaagcgtggcgctttctcatagctcacgctgtaggtatctcagttcggtgtaggtcgttcgctccaagctgggctgtgtgcacgaaccccccgttcagcccgaccgctgcgccttatccggtaactatcgtcttgagtccaacccggtaagacacgacttatcgccactggcagcagccactggtaacaggattagcagagcgaggtatgtaggcggtgctacagagttcttgaagtggtggcctaactacggctacactagaagaacagtatttggtatctgcgctctgctgaagccagttaccttcggaaaaagagttggtagctcttgatccggcaaacaaaccaccgctggtagcggtttttttgtttgcaagcagcagattacgcgcagaaaaaaaggatctcaagaagatcctttgatcttttctacggggtctgacgctcagtggaacgaaaactcacgttaagggattttggtcatgagattatcaaaaaggatcttcacctagatccttttaaattaaaaatgaagttttaaatcaatctaaagtatatatgagtaaacttggtctgacagttaccaatgcttaatcagtgaggcacctatctcagcgatctgtctatttcgttcatccatagttgcctgactccccgtcgtgtagataactacgatacgggagggcttaccatctggccccagtgctgcaatgataccgcgagacccacgctcaccggctccagatttatcagcaataaaccagccagccggaagggccgagcgcagaagtggtcctgcaactttatccgcctccatccagtctattaattgttgccgggaagctagagtaagtagttcgccagttaatagtttgcgcaacgttgttgccattgctacaggcatcgtggtgtcacgctcgtcgtttggtatggcttcattcagctccggttcccaacgatcaaggcgagttacatgatcccccatgttgtgcaaaaaagcggttagctccttcggtcctccgatcgttgtcagaagtaagttggccgcagtgttatcactcatggttatggcagcactgcataattctcttactgtcatgccatccgtaagatgcttttctgtgactggtgagtactcaaccaagtcattctgagaatagtgtatgcggcgaccgagttgctcttgcccggcgtcaatacgggataataccgcgccacatagcagaactttaaaagtgctcatcattggaaaacgttcttcggggcgaaaactctcaaggatcttaccgctgttgagatccagttcgatgtaacccactcgtgcacccaactgatcttcagcatcttttactttcaccagcgtttctgggtgagcaaaaacaggaaggcaaaatgccgcaaaaaagggaataagggcgacacggaaatgttgaatactcatactcttcctttttcaatattattgaagcatttatcagggttattgtctcatgagcggatacatatttgaatgtatttagaaaaataaacaaataggggttccgcgcacatttccccgaaaagtgccacctgacgtc

SEQ ID NO: 219 - DNA, 4798 bp, Artificial Sequence
  Synthetic
ttgcccggcgtcaatacgggataataccgcgccacatagcagaactttaaaagtgctcatcattggaaaacgttcttcggggcgaaaactctcaaggatcttaccgctgttgagatccagttcgatgtaacccactcgtgcacccaactgatcttcagcatcttttactttcaccagcgtttctgggtgagcaaaaacaggaaggcaaaatgccgcaaaaaagggaataagggcgacacggaaatgttgaatactcatactcttcctttttcattattattgaagcatttatcagggttattgtctcatgagcggatacatatttgaatgtatttagaaaaataaacaaataggggttccgcgcacatttccccgaaaagtgccacctgacgtcgacggatcgggagatctcccgatcccctatggtcgactctcagtacaatctgctctgatgccgcatagttaagccagtatctgctccctgcttgtgtgttggaggtcgctgagtagtgcgcgagcaaaatttaagctacaacaaggcaaggcttgaccgacaattgcatgaagaatctgcttagggttaggcgttttgcgctgcttcgcgatgtacgggccagatatacgcgagggcctatttcccatgattccttcatatttgcatatacgatacaaggctgttagagagataattagaattaatttgactgtaaacacaaagatattagtacaaaatacgtgacgtagaaagtaataatttcttgggtagtttgcagttttaaaattatgttttaaaatggactatcatatgcttaccgtaacttgaaagtatttcgatttcttggctttatatatcttgtggaaaggacgaaacaccgtaatacgactcactatagggtctagaattccttcattactactaaaaagtagctgataacgcgaggtattcggctccgcgacggaggctaaggaatactgccgaacaggtaggaggctcagtagcggccgctttttttcttctgaggcggaaagaaccagctggggctctagggggtatccccacgcgccctgtagcggcgcattaagcgcggcgggtgtggtggttacgcgcagcgtgaccgctacacttgccagcgccctagcgcccgctcctttcgctttcttcccttcctttctcgccacgttcgccggctttccccgtcaagctctaaatcgggggctccctttagggttccgatttagtgctttacggcacctcgaccccaaaaaacttgattagggtgatggttcacgtagtgggccatcgccctgatagacggtttttcgccctttgacgttggagtccacgttctttaatagtggactcttgttccaaactggaacaacactcaaccctatctcggtctattcttttgatttataagggattttgccgatttcggcctattggttaaaaaatgagctgatttaacaaaaatttaacgcgaattaattctgtggaatgtgtgtcagttagggtgtggaaagtccccaggctccccagcaggcagaagtatgcaaagcatgcatctcaattagtcagcaaccaggtgtggaaagtccccaggctccccagcaggcagaagtatgcaaagcatgcatctcaattagtcagcaaccatagtcccgcccctaactccgcccatcccgcccctaactccgcccagttccgcccattctccgccccatggctgactaattttttttatttatgcagaggccgaggccgcctctgcctctgagctattccagaagtagtgaggaggcttttttggaggcctaggcttttgcaaaaagctcccgggagcttgtatatccattttcggatctgatcaagagacaggatgaggatcgtttcgcatgattgaacaagatggattgcacgcaggttctccggccgcttgggtggagaggctattcggctatgactgggcacaacagacaatcggctgctctgatgccgccgtgttccggctgtcagcgcaggggcgcccggttctttttgtcaagaccgacctgtccggtgccctgaatgaactgcaggacgaggcagcgcggctatcgtggctggccacgacgggcgttccttgcgcagctgtgctcgacgttgtcactgaagcgggaagggactggctgctattgggcgaagtgccggggcaggatctcctgtcatctcaccttgctcctgccgagaaagtatccatcatggctgatgcaatgcggcggctgcatacgcttgatccggctacctgcccattcgaccaccaagcgaaacatcgcatcgagcgagcacgtactcggatggaagccggtcttgtcgatcaggatgatctggacgaagagcatcaggggctcgcgccagccgaactgttcgccaggctcaaggcgcgcatgcccgacggcgaggatctcgtcgtgacccatggcgatgcctgcttgccgaatatcatggtggaaaatggccgcttttctggattcatcgactgtggccggctgggtgtggcggaccgctatcaggacatagcgttggctacccgtgatattgctgaagagcttggcggcgaatgggctgaccgcttcctcgtgctttacggtatcgccgctcccgattcgcagcgcatcgccttctatcgccttcttgacgagttcttctgagcgggactctggggttcgaaatgaccgaccaagcgacgcccaacctgccatcacgagatttcgattccaccgccgccttctatgaaaggttgggcttcggaatcgttttccgggacgccggctggatgatcctccagcgcggggatctcatgctggagttcttcgcccaccccaacttgtttattgcagcttataatggttacaaataaagcaatagcatcacaaatttcacaaataaagcatttttttcactgcattctagttgtggtttgtccaaactcatcaatgtatcttatcatgtctgtataccgtcgacctctagctagagcttggcgtaatcatggtcatagctgtttcctgtgtgaaattgttatccgctcacaattccacacaacatacgagccggaagcataaagtgtaaagcctggggtgcctaatgagtgagctaactcacattaattgcgttgcgctcactgcccgctttccagtcgggaaacctgtcgtgccagctgcattaatgaatcggccaacgcgcggggagaggcggtttgcgtattgggcgctcttccgcttcctcgctcactgactcgctgcgctcggtcgttcggctgcggcgagcggtatcagctcactcaaaggcggtaatacggttatccacagaatcaggggataacgcaggaaagaacatgtgagcaaaaggccagcaaaaggccaggaaccgtaaaaaggccgcgttgctggcgtttttccataggctccgcccccctgacgagcatcacaaaaatcgacgctcaagtcagaggtggcgaaacccgacaggactataaagataccaggcgtttccccctggaagctccctcgtgcgctctcctgttccgaccctgccgcttaccggatacctgtccgcctttctcccttcgggaagcgtggcgctttctcaatgctcacgctgtaggtatctcagttcggtgtaggtcgttcgctccaagctgggctgtgtgcacgaaccccccgttcagcccgaccgctgcgccttatccggtaactatcgtcttgagtccaacccggtaagacacgacttatcgccactggcagcagccactggtaacaggattagcagagcgaggtatgtaggcggtgctacagagttcttgaagtggtggcctaactacggctacactagaaggacagtatttggtatctgcgctctgctgaagccagttaccttcggaaaaagagttggtagctcttgatccggcaaacaaaccaccgctggtagcggtggtttttttgtttgcaagcagcagattacgcgcagaaaaaaaggatctcaagaagatcctttgatcttttctacggggtctgacgctcagtggaacgaaaactcacgttaagggattttggtcatgagattatcaaaaaggatcttcacctagatccttttaaattaaaaatgaagttttaaatcaatctaaagtatatatgagtaaacttggtctgacagttaccaatgcttaatcagtgaggcacctatctcagcgatctgtctatttcgttcatccatagttgcctgactccccgtcgtgtagataactacgatacgggagggcttaccatctggccccagtgctgcaatgataccgcgagacccacgctcaccggctccagatttatcagcaataaaccagccagccggaagggccgagcgcagaagtggtcctgcaactttatccgcctccatccagtctattaattgttgccgggaagctagagtaagtagttcgccagttaatagtttgcgcaacgttgttgccattgctacaggcatcgtggtgtcacgctcgtcgtttggtatggcttcattcagctccggttcccaacgatcaaggcgagttacatgatcccccatgttgtgcaaaaaagcggttagctccttcggtcctccgatcgttgtcagaagtaagttggccgcagtgttatcactcatggttatggcagcactgcataattctcttactgtcatgccatccgtaagatgcttttctgtgactggtgagtactcaaccaagtcattctgagaatagtgtatgcggcgaccgagttgctc

SEQ ID NO: 220 - DNA, 4798 bp, Artificial Sequence
  Synthetic
ttgcccggcgtcaatacgggataataccgcgccacatagcagaactttaaaagtgctcatcattggaaaacgttcttcggggcgaaaactctcaaggatcttaccgctgttgagatccagttcgatgtaacccactcgtgcacccaactgatcttcagcatcttttactttcaccagcgtttctgggtgagcaaaaacaggaaggcaaaatgccgcaaaaaagggaataagggcgacacggaaatgttgaatactcatactcttcctttttcattattattgaagcatttatcagggttattgtctcatgagcggatacatatttgaatgtatttagaaaaataaacaaataggggttccgcgcacatttccccgaaaagtgccacctgacgtcgacggatcgggagatctcccgatcccctatggtcgactctcagtacaatctgctctgatgccgcatagttaagccagtatctgctccctgcttgtgtgttggaggtcgctgagtagtgcgcgagcaaaatttaagctacaacaaggcaaggcttgaccgacaattgcatgaagaatctgcttagggttaggcgttttgcgctgcttcgcgatgtacgggccagatatacgcgagggcctatttcccatgattccttcatatttgcatatacgatacaaggctgttagagagataattagaattaatttgactgtaaacacaaagatattagtacaaaatacgtgacgtagaaagtaataatttcttgggtagtttgcagttttaaaattatgttttaaaatggactatcatatgcttaccgtaacttgaaagtatttcgatttcttggctttatatatcttgtggaaaggacgaaacaccgtaatacgactcactatagggtctagaattccttcattactactaaaaagtagctgataacaatgcaggcaaatcaaccttagtctgaaggccgaatactgccgaacaggtaggaggctcagtagcggccgctttttttcttctgaggcggaaagaaccagctggggctctagggggtatccccacgcgccctgtagcggcgcattaagcgcggcgggtgtggtggttacgcgcagcgtgaccgctacacttgccagcgccctagcgcccgctcctttcgctttcttcccttcctttctcgccacgttcgccggctttccccgtcaagctctaaatcgggggctccctttagggttccgatttagtgctttacggcacctcgaccccaaaaaacttgattagggtgatggttcacgtagtgggccatcgccctgatagacggtttttcgccctttgacgttggagtccacgttctttaatagtggactcttgttccaaactggaacaacactcaaccctatctcggtctattcttttgatttataagggattttgccgatttcggcctattggttaaaaaatgagctgatttaacaaaaatttaacgcgaattaattctgtggaatgtgtgtcagttagggtgtggaaagtccccaggctccccagcaggcagaagtatgcaaagcatgcatctcaattagtcagcaaccaggtgtggaaagtccccaggctccccagcaggcagaagtatgcaaagcatgcatctcaattagtcagcaaccatagtcccgcccctaactccgcccatcccgcccctaactccgcccagttccgcccattctccgccccatggctgactaattttttttatttatgcagaggccgaggccgcctctgcctctgagctattccagaagtagtgaggaggcttttttggaggcctaggcttttgcaaaaagctcccgggagcttgtatatccattttcggatctgatcaagagacaggatgaggatcgtttcgcatgattgaacaagatggattgcacgcaggttctccggccgcttgggtggagaggctattcggctatgactgggcacaacagacaatcggctgctctgatgccgccgtgttccggctgtcagcgcaggggcgcccggttctttttgtcaagaccgacctgtccggtgccctgaatgaactgcaggacgaggcagcgcggctatcgtggctggccacgacgggcgttccttgcgcagctgtgctcgacgttgtcactgaagcgggaagggactggctgctattgggcgaagtgccggggcaggatctcctgtcatctcaccttgctcctgccgagaaagtatccatcatggctgatgcaatgcggcggctgcatacgcttgatccggctacctgcccattcgaccaccaagcgaaacatcgcatcgagcgagcacgtactcggatggaagccggtcttgtcgatcaggatgatctggacgaagagcatcaggggctcgcgccagccgaactgttcgccaggctcaaggcgcgcatgcccgacggcgaggatctcgtcgtgacccatggcgatgcctgcttgccgaatatcatggtggaaaatggccgcttttctggattcatcgactgtggccggctgggtgtggcggaccgctatcaggacatagcgttggctacccgtgatattgctgaagagcttggcggcgaatgggctgaccgcttcctcgtgctttacggtatcgccgctcccgattcgcagcgcatcgccttctatcgccttcttgacgagttcttctgagcgggactctggggttcgaaatgaccgaccaagcgacgcccaacctgccatcacgagatttcgattccaccgccgccttctatgaaaggttgggcttcggaatcgttttccgggacgccggctggatgatcctccagcgcggggatctcatgctggagttcttcgcccaccccaacttgtttattgcagcttataatggttacaaataaagcaatagcatcacaaatttcacaaataaagcatttttttcactgcattctagttgtggtttgtccaaactcatcaatgtatcttatcatgtctgtataccgtcgacctctagctagagcttggcgtaatcatggtcatagctgtttcctgtgtgaaattgttatccgctcacaattccacacaacatacgagccggaagcataaagtgtaaagcctggggtgcctaatgagtgagctaactcacattaattgcgttgcgctcactgcccgctttccagtcgggaaacctgtcgtgccagctgcattaatgaatcggccaacgcgcggggagaggcggtttgcgtattgggcgctcttccgcttcctcgctcactgactcgctgcgctcggtcgttcggctgcggcgagcggtatcagctcactcaaaggcggtaatacggttatccacagaatcaggggataacgcaggaaagaacatgtgagcaaaaggccagcaaaaggccaggaaccgtaaaaaggccgcgttgctggcgtttttccataggctccgcccccctgacgagcatcacaaaaatcgacgctcaagtcagaggtggcgaaacccgacaggactataaagataccaggcgtttccccctggaagctccctcgtgcgctctcctgttccgaccctgccgcttaccggatacctgtccgcctttctcccttcgggaagcgtggcgctttctcaatgctcacgctgtaggtatctcagttcggtgtaggtcgttcgctccaagctgggctgtgtgcacgaaccccccgttcagcccgaccgctgcgccttatccggtaactatcgtcttgagtccaacccggtaagacacgacttatcgccactggcagcagccactggtaacaggattagcagagcgaggtatgtaggcggtgctacagagttcttgaagtggtggcctaactacggctacactagaaggacagtatttggtatctgcgctctgctgaagccagttaccttcggaaaaagagttggtagctcttgatccggcaaacaaaccaccgctggtagcggtggtttttttgtttgcaagcagcagattacgcgcagaaaaaaaggatctcaagaagatcctttgatcttttctacggggtctgacgctcagtggaacgaaaactcacgttaagggattttggtcatgagattatcaaaaaggatcttcacctagatccttttaaattaaaaatgaagttttaaatcaatctaaagtatatatgagtaaacttggtctgacagttaccaatgcttaatcagtgaggcacctatctcagcgatctgtctatttcgttcatccatagttgcctgactccccgtcgtgtagataactacgatacgggagggcttaccatctggccccagtgctgcaatgataccgcgagacccacgctcaccggctccagatttatcagcaataaaccagccagccggaagggccgagcgcagaagtggtcctgcaactttatccgcctccatccagtctattaattgttgccgggaagctagagtaagtagttcgccagttaatagtttgcgcaacgttgttgccattgctacaggcatcgtggtgtcacgctcgtcgtttggtatggcttcattcagctccggttcccaacgatcaaggcgagttacatgatcccccatgttgtgcaaaaaagcggttagctccttcggtcctccgatcgttgtcagaagtaagttggccgcagtgttatcactcatggttatggcagcactgcataattctcttactgtcatgccatccgtaagatgcttttctgtgactggtgagtactcaaccaagtcattctgagaatagtgtatgcggcgaccgagttgctc

SEQ ID NO: 221 - DNA, 6613 bp, Artificial Sequence
  Synthetic
gacggatcgggagatctcccgatcccctatggtgcactctcagtacaatctgctctgatgccgcatagttaagccagtatctgctccctgcttgtgtgttggaggtcgctgagtagtgcgcgagcaaaatttaagctacaacaaggcaaggcttgaccgacaattgcatgaagaatctgcttagggttaggcgttttgcgctgcttcgcgatgtacgggccagatatacgcgttgacattgattattgactagttattaatagtaatcaattacggggtcattagttcatagcccatatatggagttccgcgttacataacttacggtaaatggcccgcctggctgaccgcccaacgacccccgcccattgacgtcaataatgacgtatgttcccatagtaacgccaatagggactttccattgacgtcaatgggtggagtatttacggtaaactgcccacttggcagtacatcaagtgtatcatatgccaagtacgccccctattgacgtcaatgacggtaaatggcccgcctggcattatgcccagtacatgaccttatgggactttcctacttggcagtacatctacgtattagtcatcgctattaccatggtgatgcggttttggcagtacatcaatgggcgtggatagcggtttgactcacggggatttccaagtctccaccccattgacgtcaatgggagtttgttttggcaccaaaatcaacgggactttccaaaatgtcgtaacaactccgccccattgacgcaaatgggcggtaggcgtgtacggtgggaggtctatataagcagagctctctggctaactagagaacccactgcttactggcttatcgaaattaatacgactcactatagggagacccaagctggctagcgtttaaacttaagcttggtaccgagctcggccaccatgggcaaccacttcgccagagccccccaccagcaggtgaagagcatctttatctctaatagccagatcgacgagatcctgtccgatatcgaggagtgcagagaggagagcgacggcatctccgagcctgagtgtctgatcgtggtgggcgattccggctctggcaagaccacaatcatcgacaagtacctggtggataacccaaggatggaggccaatgatggctctatcatccccatcctgttcaccagcctgccagccaacgccaatccagtgacagcctccgagcgcctgctgagctccatgggcgaccccctggccttttctcacggcaaggaccccgccgagctgatgaagatcgtgaacgacctgctgcgggagtgcagagtggagctgatcatcatcgatgagttccagcacatgatcgaccggaagtccaaggatgtgctgcactctaccgccgactggctgaagatgatcatcatcgattccaagatccctgtggtgctgtttggcatgccatattctacagagatcctgagggtgaacaatcagctgaggggccgcttcgagtctcagcaccacctgaagccttttcgggtgaaggacaccagcgagctgatcagatacaagaccttcatgacaatgctggatgccgccctgccatttctggaggagtctggcctggccagcgaggacatcatgaagagggtgtatatcttcagcaagggcaacatgcgcctgatccggcggctgatcaacaaggccgccaagttcgccctgctggagaatgccccttgcatctccctgaagcactttgccagggccgcaccaaaggtgagccgcgacgcctgtaagtccttcaacccctttgacaccgatacaaagaagctgaagatcatcgagccccctgaggacgtgggctgggagaattacctggccgccaagggcgatggctccggaaaacggacagccgacggaagcgagttcgagtcaccgaaaaagaagcgaaaagttggtggtagtggtggaagcggcgaggccagcggttccggacgggctgacgcattggacgattttgatctggatatgctgggaagtgacgccctcgatgattttgaccttgacatgcttggttcggatgcccttgatgactttgacctcgacatgctcggcagtgacgcccttgatgatttcgacctggacatgctgattaactctagatgagcggccgctcgagtctagagggcccgtttaaacccgctgatcagcctcgactgtgccttctagttgccagccatctgttgtttgcccctcccccgtgccttccttgaccctggaaggtgccactcccactgtcctttcctaataaaatgaggaaattgcatcgcattgtctgagtaggtgtcattctattctggggggtggggtggggcaggacagcaagggggaggattgggaagacaatagcaggcatgctggggatgcggtgggctctatggcttctgaggcggaaagaaccagctggggctctagggggtatccccacgcgccctgtagcggcgcattaagcgcggcgggtgtggtggttacgcgcagcgtgaccgctacacttgccagcgccctagcgcccgctcctttcgctttcttcccttcctttctcgccacgttcgccggctttccccgtcaagctctaaatcgggggctccctttagggttccgatttagtgctttacggcacctcgaccccaaaaaacttgattagggtgatggttcacgtagtgggccatcgccctgatagacggtttttcgccctttgacgttggagtccacgttctttaatagtggactcttgttccaaactggaacaacactcaaccctatctcggtctattcttttgatttataagggattttgccgatttcggcctattggttaaaaaatgagctgatttaacaaaaatttaacgcgaattaattctgtggaatgtgtgtcagttagggtgtggaaagtccccaggctccccagcaggcagaagtatgcaaagcatgcatctcaattagtcagcaaccaggtgtggaaagtccccaggctccccagcaggcagaagtatgcaaagcatgcatctcaattagtcagcaaccatagtcccgcccctaactccgcccatcccgcccctaactccgcccagttccgcccattctccgccccatggctgactaattttttttatttatgcagaggccgaggccgcctctgcctctgagctattccagaagtagtgaggaggcttttttggaggcctaggcttttgcaaaaagctcccgggagcttgtatatccattttcggatctgatcaagagacaggatgaggatcgtttcgcatgattgaacaagatggattgcacgcaggttctccggccgcttgggtggagaggctattcggctatgactgggcacaacagacaatcggctgctctgatgccgccgtgttccggctgtcagcgcaggggcgcccggttctttttgtcaagaccgacctgtccggtgccctgaatgaactgcaggacgaggcagcgcggctatcgtggctggccacgacgggcgttccttgcgcagctgtgctcgacgttgtcactgaagcgggaagggactggctgctattgggcgaagtgccggggcaggatctcctgtcatctcaccttgctcctgccgagaaagtatccatcatggctgatgcaatgcggcggctgcatacgcttgatccggctacctgcccattcgaccaccaagcgaaacatcgcatcgagcgagcacgtactcggatggaagccggtcttgtcgatcaggatgatctggacgaagagcatcaggggctcgcgccagccgaactgttcgccaggctcaaggcgcgcatgcccgacggcgaggatctcgtcgtgacccatggcgatgcctgcttgccgaatatcatggtggaaaatggccgcttttctggattcatcgactgtggccggctgggtgtggcggaccgctatcaggacatagcgttggctacccgtgatattgctgaagagcttggcggcgaatgggctgaccgcttcctcgtgctttacggtatcgccgctcccgattcgcagcgcatcgccttctatcgccttcttgacgagttcttctgagcgggactctggggttcgaaatgaccgaccaagcgacgcccaacctgccatcacgagatttcgattccaccgccgccttctatgaaaggttgggcttcggaatcgttttccgggacgccggctggatgatcctccagcgcggggatctcatgctggagttcttcgcccaccccaacttgtttattgcagcttataatggttacaaataaagcaatagcatcacaaatttcacaaataaagcatttttttcactgcattctagttgtggtttgtccaaactcatcaatgtatcttatcatgtctgtataccgtcgacctctagctagagcttggcgtaatcatggtcatagctgtttcctgtgtgaaattgttatccgctcacaattccacacaacatacgagccggaagcataaagtgtaaagcctggggtgcctaatgagtgagctaactcacattaattgcgttgcgctcactgcccgctttccagtcgggaaacctgtcgtgccagctgcattaatgaatcggccaacgcgcggggagaggcggtttgcgtattgggcgctcttccgcttcctcgctcactgactcgctgcgctcggtcgttcggctgcggcgagcggtatcagctcactcaaaggcggtaatacggttatccacagaatcaggggataacgcaggaaagaacatgtgagcaaaaggccagcaaaaggccaggaaccgtaaaaaggccgcgttgctggcgtttttccataggctccgcccccctgacgagcatcacaaaaatcgacgctcaagtcagaggtggcgaaacccgacaggactataaagataccaggcgtttccccctggaagctccctcgtgcgctctcctgttccgaccctgccgcttaccggatacctgtccgcctttctcccttcgggaagcgtggcgctttctcatagctcacgctgtaggtatctcagttcggtgtaggtcgttcgctccaagctgggctgtgtgcacgaaccccccgttcagcccgaccgctgcgccttatccggtaactatcgtcttgagtccaacccggtaagacacgacttatcgccactggcagcagccactggtaacaggattagcagagcgaggtatgtaggcggtgctacagagttcttgaagtggtggcctaactacggctacactagaagaacagtatttggtatctgcgctctgctgaagccagttaccttcggaaaaagagttggtagctcttgatccggcaaacaaaccaccgctggtagcggtttttttgtttgcaagcagcagattacgcgcagaaaaaaaggatctcaagaagatcctttgatcttttctacggggtctgacgctcagtggaacgaaaactcacgttaagggattttggtcatgagattatcaaaaaggatcttcacctagatccttttaaattaaaaatgaagttttaaatcaatctaaagtatatatgagtaaacttggtctgacagttaccaatgcttaatcagtgaggcacctatctcagcgatctgtctatttcgttcatccatagttgcctgactccccgtcgtgtagataactacgatacgggagggcttaccatctggccccagtgctgcaatgataccgcgagacccacgctcaccggctccagatttatcagcaataaaccagccagccggaagggccgagcgcagaagtggtcctgcaactttatccgcctccatccagtctattaattgttgccgggaagctagagtaagtagttcgccagttaatagtttgcgcaacgttgttgccattgctacaggcatcgtggtgtcacgctcgtcgtttggtatggcttcattcagctccggttcccaacgatcaaggcgagttacatgatcccccatgttgtgcaaaaaagcggttagctccttcggtcctccgatcgttgtcagaagtaagttggccgcagtgttatcactcatggttatggcagcactgcataattctcttactgtcatgccatccgtaagatgcttttctgtgactggtgagtactcaaccaagtcattctgagaatagtgtatgcggcgaccgagttgctcttgcccggcgtcaatacgggataataccgcgccacatagcagaactttaaaagtgctcatcattggaaaacgttcttcggggcgaaaactctcaaggatcttaccgctgttgagatccagttcgatgtaacccactcgtgcacccaactgatcttcagcatcttttactttcaccagcgtttctgggtgagcaaaaacaggaaggcaaaatgccgcaaaaaagggaataagggcgacacggaaatgttgaatactcatactcttcctttttcaatattattgaagcatttatcagggttattgtctcatgagcggatacatatttgaatgtatttagaaaaataaacaaataggggttccgcgcacatttccccgaaaagtgccacctgacgtc

SEQ ID NO: 222 - DNA, 7922 bp, Artificial Sequence
  Synthetic
gacggatcgggagatctcccgatcccctatggtgcactctcagtacaatctgctctgatgccgcatagttaagccagtatctgctccctgcttgtgtgttggaggtcgctgagtagtgcgcgagcaaaatttaagctacaacaaggcaaggcttgaccgacaattgcatgaagaatctgcttagggttaggcgttttgcgctgcttcgcgatgtacgggccagatatacgcgttgacattgattattgactagttattaatagtaatcaattacggggtcattagttcatagcccatatatggagttccgcgttacataacttacggtaaatggcccgcctggctgaccgcccaacgacccccgcccattgacgtcaataatgacgtatgttcccatagtaacgccaatagggactttccattgacgtcaatgggtggagtatttacggtaaactgcccacttggcagtacatcaagtgtatcatatgccaagtacgccccctattgacgtcaatgacggtaaatggcccgcctggcattatgcccagtacatgaccttatgggactttcctacttggcagtacatctacgtattagtcatcgctattaccatggtgatgcggttttggcagtacatcaatgggcgtggatagcggtttgactcacggggatttccaagtctccaccccattgacgtcaatgggagtttgttttggcaccaaaatcaacgggactttccaaaatgtcgtaacaactccgccccattgacgcaaatgggcggtaggcgtgtacggtgggaggtctatataagcagagctctctggctaactagagaacccactgcttactggcttatcgaaattaatacgactcactatagggagacccaagctggctagcgtttaaacttaagcttggtaccgccaccatgtacatcagaaacctgagaaagccttctccaaacaagaacgtgttcaagttcgcctccaccaaggtgtccagcgtggtgatgtgcgagagcagcctggagttcgacgcctgcttccaccacgagtacaacgaccttatcgagtctttcggcagccaacctgagggcttcaaatacgagttcatgggcaagtccctgccttatacacctgatgccctgatcagctacaccgataagacacagaaataccacgagtacaagccctactctaagatcgccagccctctgttccgggctgaatttgccgccaagcgggccgcttctctgaaactgggaatcgacctggtcctggtgaccgacagacagatcagagtgaaccctatcctgaacaatctgaagctgctgcatagatacagcggcgtgtacggcatcagcggcatccagaaggaactgctgagctttatccacaaaagcggcgttatcaagctgaatgacatcagcagccaggtgggaatccccatcggcgaaacccggagcttcctgtttggcctcatgcacaagggcctggtgaaggccgacctgggctgtgatgacctgaccaacaaccccaccctgtgggccacacctggcagcggctccggaaaacggacagccgacggaagcgagttcgagtcaccaaagaagaagcggaaagtcggatccggctctggaggcatgaccgatttctttaacgagttcgacgagagcctggtgcccctgaagcctcagaccccaacacagtacgtgaagctggacgatgccaacctgatccagcgggatctggacaccttctccgataccttcaagaatcaggccctgcagagatataagctgatctccaccatcgacaagaagctgtctaggggctggacacagcgcaacctggaccccatcctggacgagctgttcaagggcggcgacgtggtgaggcctaattggcgcacagtggcccggtggagaaagaagtacatcgagtctaacggcgatatcgccagcctggccgacaagaatcacaagatgggcaacaggaccaatcgcatcaagggcgacgataagttctttgataaggccctggagcggttcctggacgccaagagacctacaatcgccaccgcctatcagtactataaggatctgatcgtgatcgagaacgagtccatcgtggagggcaagatcccaatcatctcttacaacgcctttaataagaggatcaaggccatcccaccttatgcagtggcagtggcacgccacggcaagttcaaggccgaccagtggtttgcatactgcgcagcacacgtgccaccaaccagaatcctggagcgggtggagatcgatcacacacccctggacctgatcctgctggacgatgagctgctgatcccaatcggcaggccctatctgacactgctgatcgacgtgttcagcggctgcgtgctgggctttcacctgagctacaagagcccttcctacgtgagcgccgcaaaggcaatcacccacgccatcaagccaaagtccctggatgccctgaacatcgagctgcagaatgactggccctgcttcggcaagtttgagaacctggtggtggacaatggcgccgagttctggtctaagaacctggagcacgcctgtcagagcgccggcatcaacatccagtacaatcctgtgaggaagccctggctgaagccctttatcgagcggttcttcggcgtgatgaacgagtacttcctgcccgagctgcctggcaagaccttttctaatatcctggagaaggaggagtataagcccgagaaggacgccatcatgcggttcagcacatttgtggaggagttccacagatggatcgccgacgtgtaccaccaggactctaatagccgggagaccagaatccctatcaagaggtggcagcagggcttcgatgcctatcctccactgaccatgaacgaggaggaggagacaaggttttccatgctgatgcgcatctccgactctaggaccctgacacgcaatggctttaagtaccaggagctgatgtatgattctaccgccctggccgactaccgcaagcactatccacagacaaaggagaccgtgaagaagctgatcaaggtggaccccgacgatatcagcaaaatctacgtgtacctggaggagctggagtcctacctggaggtgccttgcacagatccaaccggctacacagacggcctgagcatctatgagcacaagaccatcaagaagatcaaccgggaagtgatcagagagagcaaggactccctgggcctggccaaggcaaggatggccatccacgagagagtgaagcaggagcaggaggtgttcatcgagtccaagaccaaggccaagatcacagccgtgaagaagcaggcccagatcgccgatgtgagcaataccggcacatccaccatcaaggtgtctgaggagagcgccgcaccagtgcagaagcacatctccaacgacaattctgacgattgggacgatgacctggaggcctttgagtgatctagagggcccgtttaaacccgctgatcagcctcgactgtgccttctagttgccagccatctgttgtttgcccctcccccgtgccttccttgaccctggaaggtgccactcccactgtcctttcctaataaaatgaggaaattgcatcgcattgtctgagtaggtgtcattctattctggggggtggggtggggcaggacagcaagggggaggattgggaagacaatagcaggcatgctggggatgcggtgggctctatggcttctgaggcggaaagaaccagctggggctctagggggtatccccacgcgccctgtagcggcgcattaagcgcggcgggtgtggtggttacgcgcagcgtgaccgctacacttgccagcgccctagcgcccgctcctttcgctttcttcccttcctttctcgccacgttcgccggctttccccgtcaagctctaaatcgggggctccctttagggttccgatttagtgctttacggcacctcgaccccaaaaaacttgattagggtgatggttcacgtagtgggccatcgccctgatagacggtttttcgccctttgacgttggagtccacgttctttaatagtggactcttgttccaaactggaacaacactcaaccctatctcggtctattcttttgatttataagggattttgccgatttcggcctattggttaaaaaatgagctgatttaacaaaaatttaacgcgaattaattctgtggaatgtgtgtcagttagggtgtggaaagtccccaggctccccagcaggcagaagtatgcaaagcatgcatctcaattagtcagcaaccaggtgtggaaagtccccaggctccccagcaggcagaagtatgcaaagcatgcatctcaattagtcagcaaccatagtcccgcccctaactccgcccatcccgcccctaactccgcccagttccgcccattctccgccccatggctgactaattttttttatttatgcagaggccgaggccgcctctgcctctgagctattccagaagtagtgaggaggcttttttggaggcctaggcttttgcaaaaagctcccgggagcttgtatatccattttcggatctgatcaagagacaggatgaggatcgtttcgcatgattgaacaagatggattgcacgcaggttctccggccgcttgggtggagaggctattcggctatgactgggcacaacagacaatcggctgctctgatgccgccgtgttccggctgtcagcgcaggggcgcccggttctttttgtcaagaccgacctgtccggtgccctgaatgaactgcaggacgaggcagcgcggctatcgtggctggccacgacgggcgttccttgcgcagctgtgctcgacgttgtcactgaagcgggaagggactggctgctattgggcgaagtgccggggcaggatctcctgtcatctcaccttgctcctgccgagaaagtatccatcatggctgatgcaatgcggcggctgcatacgcttgatccggctacctgcccattcgaccaccaagcgaaacatcgcatcgagcgagcacgtactcggatggaagccggtcttgtcgatcaggatgatctggacgaagagcatcaggggctcgcgccagccgaactgttcgccaggctcaaggcgcgcatgcccgacggcgaggatctcgtcgtgacccatggcgatgcctgcttgccgaatatcatggtggaaaatggccgcttttctggattcatcgactgtggccggctgggtgtggcggaccgctatcaggacatagcgttggctacccgtgatattgctgaagagcttggcggcgaatgggctgaccgcttcctcgtgctttacggtatcgccgctcccgattcgcagcgcatcgccttctatcgccttcttgacgagttcttctgagcgggactctggggttcgaaatgaccgaccaagcgacgcccaacctgccatcacgagatttcgattccaccgccgccttctatgaaaggttgggcttcggaatcgttttccgggacgccggctggatgatcctccagcgcggggatctcatgctggagttcttcgcccaccccaacttgtttattgcagcttataatggttacaaataaagcaatagcatcacaaatttcacaaataaagcatttttttcactgcattctagttgtggtttgtccaaactcatcaatgtatcttatcatgtctgtataccgtcgacctctagctagagcttggcgtaatcatggtcatagctgtttcctgtgtgaaattgttatccgctcacaattccacacaacatacgagccggaagcataaagtgtaaagcctggggtgcctaatgagtgagctaactcacattaattgcgttgcgctcactgcccgctttccagtcgggaaacctgtcgtgccagctgcattaatgaatcggccaacgcgcggggagaggcggtttgcgtattgggcgctcttccgcttcctcgctcactgactcgctgcgctcggtcgttcggctgcggcgagcggtatcagctcactcaaaggcggtaatacggttatccacagaatcaggggataacgcaggaaagaacatgtgagcaaaaggccagcaaaaggccaggaaccgtaaaaaggccgcgttgctggcgtttttccataggctccgcccccctgacgagcatcacaaaaatcgacgctcaagtcagaggtggcgaaacccgacaggactataaagataccaggcgtttccccctggaagctccctcgtgcgctctcctgttccgaccctgccgcttaccggatacctgtccgcctttctcccttcgggaagcgtggcgctttctcatagctcacgctgtaggtatctcagttcggtgtaggtcgttcgctccaagctgggctgtgtgcacgaaccccccgttcagcccgaccgctgcgccttatccggtaactatcgtcttgagtccaacccggtaagacacgacttatcgccactggcagcagccactggtaacaggattagcagagcgaggtatgtaggcggtgctacagagttcttgaagtggtggcctaactacggctacactagaagaacagtatttggtatctgcgctctgctgaagccagttaccttcggaaaaagagttggtagctcttgatccggcaaacaaaccaccgctggtagcggtttttttgtttgcaagcagcagattacgcgcagaaaaaaaggatctcaagaagatcctttgatcttttctacggggtctgacgctcagtggaacgaaaactcacgttaagggattttggtcatgagattatcaaaaaggatcttcacctagatccttttaaattaaaaatgaagttttaaatcaatctaaagtatatatgagtaaacttggtctgacagttaccaatgcttaatcagtgaggcacctatctcagcgatctgtctatttcgttcatccatagttgcctgactccccgtcgtgtagataactacgatacgggagggcttaccatctggccccagtgctgcaatgataccgcgagacccacgctcaccggctccagatttatcagcaataaaccagccagccggaagggccgagcgcagaagtggtcctgcaactttatccgcctccatccagtctattaattgttgccgggaagctagagtaagtagttcgccagttaatagtttgcgcaacgttgttgccattgctacaggcatcgtggtgtcacgctcgtcgtttggtatggcttcattcagctccggttcccaacgatcaaggcgagttacatgatcccccatgttgtgcaaaaaagcggttagctccttcggtcctccgatcgttgtcagaagtaagttggccgcagtgttatcactcatggttatggcagcactgcataattctcttactgtcatgccatccgtaagatgcttttctgtgactggtgagtactcaaccaagtcattctgagaatagtgtatgcggcgaccgagttgctcttgcccggcgtcaatacgggataataccgcgccacatagcagaactttaaaagtgctcatcattggaaaacgttcttcggggcgaaaactctcaaggatcttaccgctgttgagatccagttcgatgtaacccactcgtgcacccaactgatcttcagcatcttttactttcaccagcgtttctgggtgagcaaaaacaggaaggcaaaatgccgcaaaaaagggaataagggcgacacggaaatgttgaatactcatactcttcctttttcaatattattgaagcatttatcagggttattgtctcatgagcggatacatatttgaatgtatttagaaaaataaacaaataggggttccgcgcacatttccccgaaaagtgccacctgacgtc

SEQ ID NO: 223 - DNA, 3336 bp, Artificial Sequence
  Synthetic
aattcccatgtcagccgttaagtgttcctgtgtcactcaaaattgctttgagaggctctaagggcttctcagtgcgttacatccctggcttgttgtccacaaccgttaaaccttaaaagctttaaaagccttatatattcttttttttcttataaaacttaaaaccttagaggctatttaagttgctgatttatattaattttattgttcaaacatgagagcttagtacgtgaaacatgagagcttagtacgttagccatgagagcttagtacgttagccatgagggtttagttcgttaaacatgagagcttagtacgttaaacatgagagcttagtacgtgaaacatgagagcttagtacgtactatcaacaggttgaactgctgatcttcagatcctctacgccggacgcatcgtggccggatcaattccgttttccgctgcataaccctgcttcggggtcattatagcgattttttcggtatatccatcctttttcgcacgatatacaggattttgccaaagggttcgtgtagactttccttggtgtatccaacggcgtcagccgggcaggataggtgaagtaggcccacccgcgagcgggtgttccttcttcactgtcccttattcgcacctggcggtgctcaacgggaatcctgctctgcgaggctggccggctaccgccggcgtaacagatgagggcaagcggatggctgatgaaaccaagccaaccaggaagggcagcccacctatcacggaattgatccccctcgaattgacgcgtaaccagcaatagacataagcggctatttaacgaccctgccctgaaccgacgaccgggtcgaatttgctttcgaatttctgccattcatccgcttattatcacttattcaggcgtagcaaccaggcgtttaagggcaccaataactgccttaaaaaaattagaaaaactcatcgagcatcaaatgaaactgcaatttattcatatcaggattatcaataccatatttttgaaaaagccgtttctgtaatgaaggagaaaactcaccgaggcagttccataggatggcaagatcctggtatcggtctgcgattccgactcgtccaacatcaatacaacctattaatttcccctcgtcaaaaataaggttatcaagtgagaaatcaccatgagtgacgactgaatccggtgagaatggcaaaagtttatgcatttctttccagacttgttcaacaggccagccattacgctcgtcatcaaaatcactcgcatcaaccaaaccgttattcattcgtgattgcgcctgagcgagacgaaatacgcgatcgctgttaaaaggacaattacaaacaggaatcgaatgcaaccggcgcaggaacactgccagcgcatcaacaatattttcacctgaatcaggatattcttctaatacctggaatgctgtttttccggggatcgcagtggtgagtaaccatgcatcatcaggagtacggataaaatgcttgatggtcggaagaggcataaattccgtcagccagtttagtctgaccatctcatctgtaacatcattggcaacgctacctttgccatgtttcagaaacaactctggcgcatcgggcttcccatacaagcgatagattgtcgcacctgattgcccgacattatcgcgagcccatttatacccatataaatcagcatccatgttggaatttaatcgcggcctcgacgtttcccgttgaatatggctcatactcttcctttttcaatattattgaagcatttatcagggttattgtctcatgagcggatacatatttgaatgtatttagaaaaataaacaaataggggttccgcgcacatttccccgaaaagtgccacctgacgtctaagaaaccattattatcatgacattaacctataaaaataggcgtatcacgaggccctttcgtcacgcgtcctcggtacctaacaccggttgtcgctgcaaccatagtttgacataatgcaaccataccttgacataattaaagtcatactctgacataaagccccttattaaaaatgatgctaaaaataaattccattataatcaattatttaagaattaattaaaccatagtgtgacatagtggctttttatttgtatagtatgtgtactcaaataataaaaatttacttatgtatatacgcaacttaagaaagccatctccaaataaaaatgtatttgatcggcacgtaagaggttccaactttcaccataatgaaataagatcactaccgggcgtattttttgagttatcgagattttcaggagctaaggaagctaaaatggagaaaaaaatcactggatataccaccgttgatatatcccaatggcatcgtaaagaacattttgaggcatttcagtcagttgctcaatgtacctataaccagaccgttcagctggatattacggcctttttaaagaccgtaaagaaaaataagcacaagttttatccggcctttattcacattcttgcccgcctgatgaatgctcatccggagttccgtatggcaatgaaagacggtgagctggtgatatgggatagtgttcacccttgttacaccgttttccatgagcaaactgaaacgttttcatcgctctggagtgaataccacgacgatttccggcagtttctacacatatattcgcaagatgtggcgtgttacggtgaaaacctggcctatttccctaaagggtttattgagaatatgtttttcgtctcagccaatccctgggtgagtttcaccagttttgatttaaacgtggccaatatggacaacttcttcgcccccgttttcactatgggcaaatattatacgcaaggcgacaaggtgctgatgccgctggcgattcaggttcatcatgccgtttgtgatggcttccatgtcggcagaatgcttaatgaattacaacagtactgcgatgagtggcagggcggggcgtaatttttttaaggcagttattggtgcccttctagcccgtataggcagctgaagataaaaacaatcgattcgatgtttaagttaatgtaattctgccgaaaaggcagtgagtagtaattgaaaaaaccagtcttatatccgggctggtttttttgtttttagcgttataacttttatttcactatgtcactgtatggttgcattttatgtcagtgaatggttgcaggttttttgtaagttattgatatgcctatccagtgtatgtcacgctttgcttgcagcgacattaagccaacctgttaggatccctctagagtagtagtccatgggtatggacagcggtggagggg

SEQ ID NO: 224 - DNA, 6691 bp, Artificial Sequence
  Synthetic
gacggatcgggagatctcccgatcccctatggtcgactctcagtacaatctgctctgatgccgcatagttaagccagtatctgctccctgcttgtgtgttggaggtcgctgagtagtgcgcgagcaaaatttaagctacaacaaggcaaggcttgaccgacaattgcatgaagaatctgcttagggttaggcgttttgcgctgcttcgcgatgtacgggccagatatacgcgttgacattgattattgactagttattaatagtaatcaattacggggtcattagttcatagcccatatatggagttccgcgttacataacttacggtaaatggcccgcctggctgaccgcccaacgacccccgcccattgacgtcaataatgacgtatgttcccatagtaacgccaatagggactttccattgacgtcaatgggtggactatttacggtaaactgcccacttggcagtacatcaagtgtatcatatgccaagtacgccccctattgacgtcaatgacggtaaatggcccgcctggcattatgcccagtacatgaccttatgggactttcctacttggcagtacatctacgtattagtcatcgctattaccatggtgatgcggttttggcagtacatcaatgggcgtggatagcggtttgactcacggggatttccaagtctccaccccattgacgtcaatgggagtttgttttggcaccaaaatcaacgggactttccaaaatgtcgtaacaactccgccccattgacgcaaatgggcggtaggcgtgtacggtgggaggtctatataagcagagctctctggctaactagagaacccactgcttactggcttatcgaaattaatacgactcactatagggagacccaagcttggtaccgagctcggatccctacttccaatccaatgccaccatggccttcctgttttctcccaaggcccgggcctttagcgacgagtccctggagtcttatctgctgagagtggtgagcgagaatttctttgatagctacgagggcctgtccctggccatcagggaggagctgcacgagctggactttgaggcacacggagcattcccagtggacctgaagcggctgaacgtgtaccacgccaagcacaactctcacttcagaatgagagccctgggactgctggagaccctgctggacctgccccggtatgagctgcagaagctggccctgctgaagagcgatatcaagtttaacagctccgtggccctgtacaacaatggcgtggacatccctctgaggttcatcaggcaccacgcagaggaggcagtggattctatcccagtgtgcagccagtgtctggccgaggaggcctacatcaagcagtcctggcacatcaagtgggtgaatgcctgcaccaagcaccagtgtgccctgctgcacaactgccccgagtgttacgcccctatcaactatatcgagaatgagtccatcacacactgctcttgtggctttgagctgagctgcgcctctaccagccccgtgaatacactgtccatcgagcacctgaacaagctgctggacaagggcgagaggaacgattccaatcctctgtttaacaatatgaccctgacagagaggttcgccgccctgctgtggtatcaggagcggtactctcagaccgacaacttctgcctgaatgatgccgtgaactactttagcaagtggcctgccgtgttcaatacagagctggacgagctgtccaagaacgccgagatgaagctgatcgatctgtttaacaagaccgagttcaagtttatcttcggcgacgccatcctggcctgtccaagcacacagaagcagtccgagtctcacttcatctacagggccctgctggactatctggtgaccctggtggagtccaatccaaagacaaagaagcccaacgccgccgatctgctggtgtctgtgctggaggcagccaccctgctgggcacaagcgtggagcaggtgtaccgcctgtatcagaatggcatcctgcagaccgcctttcggcacaagatgaatcagagaatcaacccttacaagggcgccttctttctgaggcacgtgatcgagtataagacatccttcggcaacgataaggcccgcatgtacctgtctgcctggggctccggaaaacggacagccgacggaagcgagttcgagtcaccgaaaaagaagcgaaaagtttaatctagagggccctattctatagtgtcacctaaatgctagagctcgctgatcagcctcgactgtgccttctagttgccagccatctgttgtttgcccctcccccgtgccttccttgaccctggaaggtgccactcccactgtcctttcctaataaaatgaggaaattgcatcgcattgtctgagtaggtgtcattctattctggggggtggggtggggcaggacagcaagggggaggattgggaagacaatagcaggcatgctggggatgcggtgggctctatggcttctgaggcggaaagaaccagctggggctctagggggtatccccacgcgccctgtagcggcgcattaagcgcggcgggtgtggtggttacgcgcagcgtgaccgctacacttgccagcgccctagcgcccgctcctttcgctttcttcccttcctttctcgccacgttcgccggctttccccgtcaagctctaaatcggggcatccctttagggttccgatttagtgctttacggcacctcgaccccaaaaaacttgattagggtgatggttcacgtagtgggccatcgccctgatagacggtttttcgccctttgacgttggagtccacgttctttaatagtggactcttgttccaaactggaacaacactcaaccctatctcggtctattcttttgatttataagggattttggggatttcggcctattggttaaaaaatgagctgatttaacaaaaatttaacgcgaattaattctgtggaatgtgtgtcagttagggtgtggaaagtccccaggctccccaggcaggcagaagtatgcaaagcatgcatctcaattagtcagcaaccaggtgtggaaagtccccaggctccccagcaggcagaagtatgcaaagcatgcatctcaattagtcagcaaccatagtcccgcccctaactccgcccatcccgcccctaactccgcccagttccgcccattctccgccccatggctgactaattttttttatttatgcagaggccgaggccgcctctgcctctgagctattccagaagtagtgaggaggcttttttggaggcctaggcttttgcaaaaagctcccgggagcttgtatatccattttcggatctgatcaagagacaggatgaggatcgtttcgcatgattgaacaagatggattgcacgcaggttctccggccgcttgggtggagaggctattcggctatgactgggcacaacagacaatcggctgctctgatgccgccgtgttccggctgtcagcgcaggggcgcccggttctttttgtcaagaccgacctgtccggtgccctgaatgaactgcaggacgaggcagcgcggctatcgtggctggccacgacgggcgttccttgcgcagctgtgctcgacgttgtcactgaagcgggaagggactggctgctattgggcgaagtgccggggcaggatctcctgtcatctcaccttgctcctgccgagaaagtatccatcatggctgatgcaatgcggcggctgcatacgcttgatccggctacctgcccattcgaccaccaagcgaaacatcgcatcgagcgagcacgtactcggatggaagccggtcttgtcgatcaggatgatctggacgaagagcatcaggggctcgcgccagccgaactgttcgccaggctcaaggcgcgcatgcccgacggcgaggatctcgtcgtgacccatggcgatgcctgcttgccgaatatcatggtggaaaatggccgcttttctggattcatcgactgtggccggctgggtgtggcggaccgctatcaggacatagcgttggctacccgtgatattgctgaagagcttggcggcgaatgggctgaccgcttcctcgtgctttacggtatcgccgctcccgattcgcagcgcatcgccttctatcgccttcttgacgagttcttctgagcgggactctggggttcgaaatgaccgaccaagcgacgcccaacctgccatcacgagatttcgattccaccgccgccttctatgaaaggttgggcttcggaatcgttttccgggacgccggctggatgatcctccagcgcggggatctcatgctggagttcttcgcccaccccaacttgtttattgcagcttataatggttacaaataaagcaatagcatcacaaatttcacaaataaagcatttttttcactgcattctagttgtggtttgtccaaactcatcaatgtatcttatcatgtctgtataccgtcgacctctagctagagcttggcgtaatcatggtcatagctgtttcctgtgtgaaattgttatccgctcacaattccacacaacatacgagccggaagcataaagtgtaaagcctggggtgcctaatgagtgagctaactcacattaattgcgttgcgctcactgcccgctttccagtcgggaaacctgtcgtgccagctgcattaatgaatcggccaacgcgcggggagaggcggtttgcgtattgggcgctcttccgcttcctcgctcactgactcgctgcgctcggtcgttcggctgcggcgagcggtatcagctcactcaaaggcggtaatacggttatccacagaatcaggggataacgcaggaaagaacatgtgagcaaaaggccagcaaaaggccaggaaccgtaaaaaggccgcgttgctggcgtttttccataggctccgcccccctgacgagcatcacaaaaatcgacgctcaagtcagaggtggcgaaacccgacaggactataaagataccaggcgtttccccctggaagctccctcgtgcgctctcctgttccgaccctgccgcttaccggatacctgtccgcctttctcccttcgggaagcgtggcgctttctcaatgctcacgctgtaggtatctcagttcggtgtaggtcgttcgctccaagctgggctgtgtgcacgaaccccccgttcagcccgaccgctgcgccttatccggtaactatcgtcttgagtccaacccggtaagacacgacttatcgccactggcagcagccactggtaacaggattagcagagcgaggtatgtaggcggtgctacagagttcttgaagtggtggcctaactacggctacactagaaggacagtatttggtatctgcgctctgctgaagccagttaccttcggaaaaagagttggtagctcttgatccggcaaacaaaccaccgctggtagcggtggtttttttgtttgcaagcagcagattacgcgcagaaaaaaaggatctcaagaagatcctttgatcttttctacggggtctgacgctcagtggaacgaaaactcacgttaagggattttggtcatgagattatcaaaaaggatcttcacctagatccttttaaattaaaaatgaagttttaaatcaatctaaagtatatatgagtaaacttggtctgacagttaccaatgcttaatcagtgaggcacctatctcagcgatctgtctatttcgttcatccatagttgcctgactccccgtcgtgtagataactacgatacgggagggcttaccatctggccccagtgctgcaatgataccgcgagacccacgctcaccggctccagatttatcagcaataaaccagccagccggaagggccgagcgcagaagtggtcctgcaactttatccgcctccatccagtctattaattgttgccgggaagctagagtaagtagttcgccagttaatagtttgcgcaacgttgttgccattgctacaggcatcgtggtgtcacgctcgtcgtttggtatggcttcattcagctccggttcccaacgatcaaggcgagttacatgatcccccatgttgtgcaaaaaagcggttagctccttcggtcctccgatcgttgtcagaagtaagttggccgcagtgttatcactcatggttatggcagcactgcataattctcttactgtcatgccatccgtaagatgcttttctgtgactggtgagtactcaaccaagtcattctgagaatagtgtatgcggcgaccgagttgctcttgcccggcgtcaatacgggataataccgcgccacatagcagaactttaaaagtgctcatcattggaaaacgttcttcggggcgaaaactctcaaggatcttaccgctgttgagatccagttcgatgtaacccactcgtgcacccaactgatcttcagcatcttttactttcaccagcgtttctgggtgagcaaaaacaggaaggcaaaatgccgcaaaaaagggaataagggcgacacggaaatgttgaatactcatactcttcctttttcattattattgaagcatttatcagggttattgtctcatgagcggatacatatttgaatgtatttagaaaaataaacaaataggggttccgcgcacatttccccgaaaagtgccacctgacgtc

SEQ ID NO: 225 - DNA, 7552 bp, Artificial Sequence
  Synthetic
gacggatcgggagatctcccgatcccctatggtcgactctcagtacaatctgctctgatgccgcatagttaagccagtatctgctccctgcttgtgtgttggaggtcgctgagtagtgcgcgagcaaaatttaagctacaacaaggcaaggcttgaccgacaattgcatgaagaatctgcttagggttaggcgttttgcgctgcttcgcgatgtacgggccagatatacgcgttgacattgattattgactagttattaatagtaatcaattacggggtcattagttcatagcccatatatggagttccgcgttacataacttacggtaaatggcccgcctggctgaccgcccaacgacccccgcccattgacgtcaataatgacgtatgttcccatagtaacgccaatagggactttccattgacgtcaatgggtggactatttacggtaaactgcccacttggcagtacatcaagtgtatcatatgccaagtacgccccctattgacgtcaatgacggtaaatggcccgcctggcattatgcccagtacatgaccttatgggactttcctacttggcagtacatctacgtattagtcatcgctattaccatggtgatgcggttttggcagtacatcaatgggcgtggatagcggtttgactcacggggatttccaagtctccaccccattgacgtcaatgggagtttgttttggcaccaaaatcaacgggactttccaaaatgtcgtaacaactccgccccattgacgcaaatgggcggtaggcgtgtacggtgggaggtctatataagcagagctctctggctaactagagaacccactgcttactggcttatcgaaattaatacgactcactatagggagacccaagcttggtaccgagctcggatccctacttccaatccaatgccaccatgggccacctgaaggagctgctggagatcaccgacaccacagagagggatcgctccctgcggagagccttctctccctacaccgccatgatcgacatcacaggctccgaggccgtggccctgatcatcctgctgaatctgacatatcgcaagaaccaggtggacgatctgctggacaagaagctggccaagcaggccctgaagagcgaggatcacatcaacaagtgcatcaaggagatcgcctggtttcacacccacaatctgaagtacccagatatccgggtgtccaagcagaacctggccgtggagccccctacactgcactcttatgtgctgagctccgccaattaccccaaggcctatggctggagccacaattccgccaaggtgaactttgccaagctgttcgtgagctactttaagtggcagaaccaggtgtcctggctggcccaggtgctggccaccaatagcgacaactggaagtctgccttcacaagcctgggcctgtccgtgaaggccttcaagagcctgtgcgtgaccgtgaagaatagcctgcctgaggaggccatcccagactccgtggataggtattctcgccagatcagaatgccataccacgacggctatctggccgtgacccccgtgatcagccacgtggtgcagtccaagatccagcaggccgccatcgataagcgggccagattctccaacgtggagtttacacgcccagcagccgtgtctatgctggccgccagcctgggaggcgtgatcaatgtgctgaactacccaccctatatcagaagcaagtaccacggcctgtctaatagcagggccttcaagctgaacaatggccagaccgtgtttaacgtggaggccctgctgaagcctgagctgatcaaggccctggagggcatcatcttctccaacaatgccctggccctgaagcagaggcgccagcagaaggtgaagaatatcaaggagctgcgcaacacactgctggagtggttctctccagtgtttgagtggcggctggacgccatcgagaatggctacgatctggagcagctggagtccgcctctgagagactggagtataagatcctgtccctgcccgacaatgagctgccttctctgaccatcccactgttcagactgctgaacgagatgctgggcggcgtgagcatgacacagaggtacgcctttcaccccaagctgatgtcccctctgaaggccgccctgcagtggctgctggtgaatctgaccgaccagaagcacgtgctgatcgaggaggacgatgagcactacagatatctgcacctgtccggcatcagggtgtttgatgcccaggccctgtctaacccatactgctctggcatccccagcctgacagccgtgtggggaatgatccactcttatcagaggaagctgaatgaggccctgggcaccaacgtgcggttcaccagcttcagctggttcatcagaaactacagcgccgtggcaggcaagaagctgcccgagctgagcctgcagggagcacagcagtccagactgaagaggcctggcatcatcgacggcaagtactgtgacctggtgttcgatctgatcatccacatcgatggctatgaggacgatctgcaggccgtggacagcaagcctgatatcctgaaggcccacttcccatccaattttgcaggaggcgtgatgcaccagccagagctgaactctaatatcaactggtgctgtctgtatagcaatgagaaccagctgtttgagaagctgcggagactgcccctgtccggctgctgggtcatgcctaccgagcacaagatccaggacctggatgagctgctgctgctgctgaactctgacagcaagctgtccccttctatgatgggctacatgctgctgaccgagccaatggcccgcgtgggcagcctggagcggctgcactgttacgccgagcctgccatcggcgtggtgaagtatgaggccgccacatctgtgaggctgaagggcatcggcaattatttcaacagcgccttttggatgctggatgcccaggagaagttcatgctgatgaagaaggtgggctccggaaaacggacagccgacggaagcgagttcgagtcaccgaaaaagaagcgaaaagtttaatctagagggccctattctatagtgtcacctaaatgctagagctcgctgatcagcctcgactgtgccttctagttgccagccatctgttgtttgcccctcccccgtgccttccttgaccctggaaggtgccactcccactgtcctttcctaataaaatgaggaaattgcatcgcattgtctgagtaggtgtcattctattctggggggtggggtggggcaggacagcaagggggaggattgggaagacaatagcaggcatgctggggatgcggtgggctctatggcttctgaggcggaaagaaccagctggggctctagggggtatccccacgcgccctgtagcggcgcattaagcgcggcgggtgtggtggttacgcgcagcgtgaccgctacacttgccagcgccctagcgcccgctcctttcgctttcttcccttcctttctcgccacgttcgccggctttccccgtcaagctctaaatcggggcatccctttagggttccgatttagtgctttacggcacctcgaccccaaaaaacttgattagggtgatggttcacgtagtgggccatcgccctgatagacggtttttcgccctttgacgttggagtccacgttctttaatagtggactcttgttccaaactggaacaacactcaaccctatctcggtctattcttttgatttataagggattttggggatttcggcctattggttaaaaaatgagctgatttaacaaaaatttaacgcgaattaattctgtggaatgtgtgtcagttagggtgtggaaagtccccaggctccccaggcaggcagaagtatgcaaagcatgcatctcaattagtcagcaaccaggtgtggaaagtccccaggctccccagcaggcagaagtatgcaaagcatgcatctcaattagtcagcaaccatagtcccgcccctaactccgcccatcccgcccctaactccgcccagttccgcccattctccgccccatggctgactaattttttttatttatgcagaggccgaggccgcctctgcctctgagctattccagaagtagtgaggaggcttttttggaggcctaggcttttgcaaaaagctcccgggagcttgtatatccattttcggatctgatcaagagacaggatgaggatcgtttcgcatgattgaacaagatggattgcacgcaggttctccggccgcttgggtggagaggctattcggctatgactgggcacaacagacaatcggctgctctgatgccgccgtgttccggctgtcagcgcaggggcgcccggttctttttgtcaagaccgacctgtccggtgccctgaatgaactgcaggacgaggcagcgcggctatcgtggctggccacgacgggcgttccttgcgcagctgtgctcgacgttgtcactgaagcgggaagggactggctgctattgggcgaagtgccggggcaggatctcctgtcatctcaccttgctcctgccgagaaagtatccatcatggctgatgcaatgcggcggctgcatacgcttgatccggctacctgcccattcgaccaccaagcgaaacatcgcatcgagcgagcacgtactcggatggaagccggtcttgtcgatcaggatgatctggacgaagagcatcaggggctcgcgccagccgaactgttcgccaggctcaaggcgcgcatgcccgacggcgaggatctcgtcgtgacccatggcgatgcctgcttgccgaatatcatggtggaaaatggccgcttttctggattcatcgactgtggccggctgggtgtggcggaccgctatcaggacatagcgttggctacccgtgatattgctgaagagcttggcggcgaatgggctgaccgcttcctcgtgctttacggtatcgccgctcccgattcgcagcgcatcgccttctatcgccttcttgacgagttcttctgagcgggactctggggttcgaaatgaccgaccaagcgacgcccaacctgccatcacgagatttcgattccaccgccgccttctatgaaaggttgggcttcggaatcgttttccgggacgccggctggatgatcctccagcgcggggatctcatgctggagttcttcgcccaccccaacttgtttattgcagcttataatggttacaaataaagcaatagcatcacaaatttcacaaataaagcatttttttcactgcattctagttgtggtttgtccaaactcatcaatgtatcttatcatgtctgtataccgtcgacctctagctagagcttggcgtaatcatggtcatagctgtttcctgtgtgaaattgttatccgctcacaattccacacaacatacgagccggaagcataaagtgtaaagcctggggtgcctaatgagtgagctaactcacattaattgcgttgcgctcactgcccgctttccagtcgggaaacctgtcgtgccagctgcattaatgaatcggccaacgcgcggggagaggcggtttgcgtattgggcgctcttccgcttcctcgctcactgactcgctgcgctcggtcgttcggctgcggcgagcggtatcagctcactcaaaggcggtaatacggttatccacagaatcaggggataacgcaggaaagaacatgtgagcaaaaggccagcaaaaggccaggaaccgtaaaaaggccgcgttgctggcgtttttccataggctccgcccccctgacgagcatcacaaaaatcgacgctcaagtcagaggtggcgaaacccgacaggactataaagataccaggcgtttccccctggaagctccctcgtgcgctctcctgttccgaccctgccgcttaccggatacctgtccgcctttctcccttcgggaagcgtggcgctttctcaatgctcacgctgtaggtatctcagttcggtgtaggtcgttcgctccaagctgggctgtgtgcacgaaccccccgttcagcccgaccgctgcgccttatccggtaactatcgtcttgagtccaacccggtaagacacgacttatcgccactggcagcagccactggtaacaggattagcagagcgaggtatgtaggcggtgctacagagttcttgaagtggtggcctaactacggctacactagaaggacagtatttggtatctgcgctctgctgaagccagttaccttcggaaaaagagttggtagctcttgatccggcaaacaaaccaccgctggtagcggtggtttttttgtttgcaagcagcagattacgcgcagaaaaaaaggatctcaagaagatcctttgatcttttctacggggtctgacgctcagtggaacgaaaactcacgttaagggattttggtcatgagattatcaaaaaggatcttcacctagatccttttaaattaaaaatgaagttttaaatcaatctaaagtatatatgagtaaacttggtctgacagttaccaatgcttaatcagtgaggcacctatctcagcgatctgtctatttcgttcatccatagttgcctgactccccgtcgtgtagataactacgatacgggagggcttaccatctggccccagtgctgcaatgataccgcgagacccacgctcaccggctccagatttatcagcaataaaccagccagccggaagggccgagcgcagaagtggtcctgcaactttatccgcctccatccagtctattaattgttgccgggaagctagagtaagtagttcgccagttaatagtttgcgcaacgttgttgccattgctacaggcatcgtggtgtcacgctcgtcgtttggtatggcttcattcagctccggttcccaacgatcaaggcgagttacatgatcccccatgttgtgcaaaaaagcggttagctccttcggtcctccgatcgttgtcagaagtaagttggccgcagtgttatcactcatggttatggcagcactgcataattctcttactgtcatgccatccgtaagatgcttttctgtgactggtgagtactcaaccaagtcattctgagaatagtgtatgcggcgaccgagttgctcttgcccggcgtcaatacgggataataccgcgccacatagcagaactttaaaagtgctcatcattggaaaacgttcttcggggcgaaaactctcaaggatcttaccgctgttgagatccagttcgatgtaacccactcgtgcacccaactgatcttcagcatcttttactttcaccagcgtttctgggtgagcaaaaacaggaaggcaaaatgccgcaaaaaagggaataagggcgacacggaaatgttgaatactcatactcttcctttttcattattattgaagcatttatcagggttattgtctcatgagcggatacatatttgaatgtatttagaaaaataaacaaataggggttccgcgcacatttccccgaaaagtgccacctgacgtc

SEQ ID NO: 226 - DNA, 6514 bp, Artificial Sequence
  Synthetic
gacggatcgggagatctcccgatcccctatggtcgactctcagtacaatctgctctgatgccgcatagttaagccagtatctgctccctgcttgtgtgttggaggtcgctgagtagtgcgcgagcaaaatttaagctacaacaaggcaaggcttgaccgacaattgcatgaagaatctgcttagggttaggcgttttgcgctgcttcgcgatgtacgggccagatatacgcgttgacattgattattgactagttattaatagtaatcaattacggggtcattagttcatagcccatatatggagttccgcgttacataacttacggtaaatggcccgcctggctgaccgcccaacgacccccgcccattgacgtcaataatgacgtatgttcccatagtaacgccaatagggactttccattgacgtcaatgggtggactatttacggtaaactgcccacttggcagtacatcaagtgtatcatatgccaagtacgccccctattgacgtcaatgacggtaaatggcccgcctggcattatgcccagtacatgaccttatgggactttcctacttggcagtacatctacgtattagtcatcgctattaccatggtgatgcggttttggcagtacatcaatgggcgtggatagcggtttgactcacggggatttccaagtctccaccccattgacgtcaatgggagtttgttttggcaccaaaatcaacgggactttccaaaatgtcgtaacaactccgccccattgacgcaaatgggcggtaggcgtgtacggtgggaggtctatataagcagagctctctggctaactagagaacccactgcttactggcttatcgaaattaatacgactcactatagggagacccaagcttggtaccgagctcggatccctacttccaatccaatgccaccatggagctgtgcaacatcctgaagtacgacaggtctctgtatcccggcaaggccgtgttcttttacaagaccgccgacagcgattttgtgccactggaggccgatatcaacaagatcaggggaccaaagagcggcttcaccgaggcctttacacctcagttctctccaaagaatatcagccctcaggacctgacccacaacaatatcctgacactggaggagtgctatgtgccccctaacgtggagcacatcttctgtaggttttctctgcgcgtgcaggccaatagcctggtgcccagcggctgctccgatcctgaggtgttttccctgctgaaggagctggccgagaccttcaaggagtgcggaggatacaaggagctggccgtgcggtattgtagaaacatcctgatcggcacatggctgtggcggaaccagaataccggcaatacacagatcgagatcaagacctctaagggcagctgttacctgatcgacaacacaagaaagctggcctgggagagcaagtgggcctccgacgatctgaaggtgctggaggagctgtccaacgagatcgagtctgccctgaccgaccctaacgtgttctggagcgccgatatcacagccaagatcgaggcctccttctgccaggaaatctacccatctcagatcctgaacgacaaggtgaagcagggcgaggcctccaagcagtttgtgaaggccaagtgtgccgatggccggtatgccgtgtccttcaattctgtgaagatcggcgccgccctgcagagcatcgacgattggtgggacgaggatgcctccaagaggctgcgcgtgcacgagttcggagcagacaaggagatcggagtggcacggagaccacccgatagcgagcagaacttttactccatcttcaagaataccgagtggtatctgtccgccctgaagaattgtatcacaaacaagaatgagaagatcgatcccgccatctactatctgttttctgtgctgatcaagggcggcatgttccagaagaaggccgaggccaagaaggccggctccggaaaacggacagccgacggaagcgagttcgagtcaccgaaaaagaagcgaaaagtttaatctagagggccctattctatagtgtcacctaaatgctagagctcgctgatcagcctcgactgtgccttctagttgccagccatctgttgtttgcccctcccccgtgccttccttgaccctggaaggtgccactcccactgtcctttcctaataaaatgaggaaattgcatcgcattgtctgagtaggtgtcattctattctggggggtggggtggggcaggacagcaagggggaggattgggaagacaatagcaggcatgctggggatgcggtgggctctatggcttctgaggcggaaagaaccagctggggctctagggggtatccccacgcgccctgtagcggcgcattaagcgcggcgggtgtggtggttacgcgcagcgtgaccgctacacttgccagcgccctagcgcccgctcctttcgctttcttcccttcctttctcgccacgttcgccggctttccccgtcaagctctaaatcggggcatccctttagggttccgatttagtgctttacggcacctcgaccccaaaaaacttgattagggtgatggttcacgtagtgggccatcgccctgatagacggtttttcgccctttgacgttggagtccacgttctttaatagtggactcttgttccaaactggaacaacactcaaccctatctcggtctattcttttgatttataagggattttggggatttcggcctattggttaaaaaatgagctgatttaacaaaaatttaacgcgaattaattctgtggaatgtgtgtcagttagggtgtggaaagtccccaggctccccaggcaggcagaagtatgcaaagcatgcatctcaattagtcagcaaccaggtgtggaaagtccccaggctccccagcaggcagaagtatgcaaagcatgcatctcaattagtcagcaaccatagtcccgcccctaactccgcccatcccgcccctaactccgcccagttccgcccattctccgccccatggctgactaattttttttatttatgcagaggccgaggccgcctctgcctctgagctattccagaagtagtgaggaggcttttttggaggcctaggcttttgcaaaaagctcccgggagcttgtatatccattttcggatctgatcaagagacaggatgaggatcgtttcgcatgattgaacaagatggattgcacgcaggttctccggccgcttgggtggagaggctattcggctatgactgggcacaacagacaatcggctgctctgatgccgccgtgttccggctgtcagcgcaggggcgcccggttctttttgtcaagaccgacctgtccggtgccctgaatgaactgcaggacgaggcagcgcggctatcgtggctggccacgacgggcgttccttgcgcagctgtgctcgacgttgtcactgaagcgggaagggactggctgctattgggcgaagtgccggggcaggatctcctgtcatctcaccttgctcctgccgagaaagtatccatcatggctgatgcaatgcggcggctgcatacgcttgatccggctacctgcccattcgaccaccaagcgaaacatcgcatcgagcgagcacgtactcggatggaagccggtcttgtcgatcaggatgatctggacgaagagcatcaggggctcgcgccagccgaactgttcgccaggctcaaggcgcgcatgcccgacggcgaggatctcgtcgtgacccatggcgatgcctgcttgccgaatatcatggtggaaaatggccgcttttctggattcatcgactgtggccggctgggtgtggcggaccgctatcaggacatagcgttggctacccgtgatattgctgaagagcttggcggcgaatgggctgaccgcttcctcgtgctttacggtatcgccgctcccgattcgcagcgcatcgccttctatcgccttcttgacgagttcttctgagcgggactctggggttcgaaatgaccgaccaagcgacgcccaacctgccatcacgagatttcgattccaccgccgccttctatgaaaggttgggcttcggaatcgttttccgggacgccggctggatgatcctccagcgcggggatctcatgctggagttcttcgcccaccccaacttgtttattgcagcttataatggttacaaataaagcaatagcatcacaaatttcacaaataaagcatttttttcactgcattctagttgtggtttgtccaaactcatcaatgtatcttatcatgtctgtataccgtcgacctctagctagagcttggcgtaatcatggtcatagctgtttcctgtgtgaaattgttatccgctcacaattccacacaacatacgagccggaagcataaagtgtaaagcctggggtgcctaatgagtgagctaactcacattaattgcgttgcgctcactgcccgctttccagtcgggaaacctgtcgtgccagctgcattaatgaatcggccaacgcgcggggagaggcggtttgcgtattgggcgctcttccgcttcctcgctcactgactcgctgcgctcggtcgttcggctgcggcgagcggtatcagctcactcaaaggcggtaatacggttatccacagaatcaggggataacgcaggaaagaacatgtgagcaaaaggccagcaaaaggccaggaaccgtaaaaaggccgcgttgctggcgtttttccataggctccgcccccctgacgagcatcacaaaaatcgacgctcaagtcagaggtggcgaaacccgacaggactataaagataccaggcgtttccccctggaagctccctcgtgcgctctcctgttccgaccctgccgcttaccggatacctgtccgcctttctcccttcgggaagcgtggcgctttctcaatgctcacgctgtaggtatctcagttcggtgtaggtcgttcgctccaagctgggctgtgtgcacgaaccccccgttcagcccgaccgctgcgccttatccggtaactatcgtcttgagtccaacccggtaagacacgacttatcgccactggcagcagccactggtaacaggattagcagagcgaggtatgtaggcggtgctacagagttcttgaagtggtggcctaactacggctacactagaaggacagtatttggtatctgcgctctgctgaagccagttaccttcggaaaaagagttggtagctcttgatccggcaaacaaaccaccgctggtagcggtggtttttttgtttgcaagcagcagattacgcgcagaaaaaaaggatctcaagaagatcctttgatcttttctacggggtctgacgctcagtggaacgaaaactcacgttaagggattttggtcatgagattatcaaaaaggatcttcacctagatccttttaaattaaaaatgaagttttaaatcaatctaaagtatatatgagtaaacttggtctgacagttaccaatgcttaatcagtgaggcacctatctcagcgatctgtctatttcgttcatccatagttgcctgactccccgtcgtgtagataactacgatacgggagggcttaccatctggccccagtgctgcaatgataccgcgagacccacgctcaccggctccagatttatcagcaataaaccagccagccggaagggccgagcgcagaagtggtcctgcaactttatccgcctccatccagtctattaattgttgccgggaagctagagtaagtagttcgccagttaatagtttgcgcaacgttgttgccattgctacaggcatcgtggtgtcacgctcgtcgtttggtatggcttcattcagctccggttcccaacgatcaaggcgagttacatgatcccccatgttgtgcaaaaaagcggttagctccttcggtcctccgatcgttgtcagaagtaagttggccgcagtgttatcactcatggttatggcagcactgcataattctcttactgtcatgccatccgtaagatgcttttctgtgactggtgagtactcaaccaagtcattctgagaatagtgtatgcggcgaccgagttgctcttgcccggcgtcaatacgggataataccgcgccacatagcagaactttaaaagtgctcatcattggaaaacgttcttcggggcgaaaactctcaaggatcttaccgctgttgagatccagttcgatgtaacccactcgtgcacccaactgatcttcagcatcttttactttcaccagcgtttctgggtgagcaaaaacaggaaggcaaaatgccgcaaaaaagggaataagggcgacacggaaatgttgaatactcatactcttcctttttcattattattgaagcatttatcagggttattgtctcatgagcggatacatatttgaatgtatttagaaaaataaacaaataggggttccgcgcacatttccccgaaaagtgccacctgacgtc

SEQ ID NO: 227 - DNA, 6076 bp, Artificial Sequence
  Synthetic
gacggatcgggagatctcccgatcccctatggtcgactctcagtacaatctgctctgatgccgcatagttaagccagtatctgctccctgcttgtgtgttggaggtcgctgagtagtgcgcgagcaaaatttaagctacaacaaggcaaggcttgaccgacaattgcatgaagaatctgcttagggttaggcgttttgcgctgcttcgcgatgtacgggccagatatacgcgttgacattgattattgactagttattaatagtaatcaattacggggtcattagttcatagcccatatatggagttccgcgttacataacttacggtaaatggcccgcctggctgaccgcccaacgacccccgcccattgacgtcaataatgacgtatgttcccatagtaacgccaatagggactttccattgacgtcaatgggtggactatttacggtaaactgcccacttggcagtacatcaagtgtatcatatgccaagtacgccccctattgacgtcaatgacggtaaatggcccgcctggcattatgcccagtacatgaccttatgggactttcctacttggcagtacatctacgtattagtcatcgctattaccatggtgatgcggttttggcagtacatcaatgggcgtggatagcggtttgactcacggggatttccaagtctccaccccattgacgtcaatgggagtttgttttggcaccaaaatcaacgggactttccaaaatgtcgtaacaactccgccccattgacgcaaatgggcggtaggcgtgtacggtgggaggtctatataagcagagctctctggctaactagagaacccactgcttactggcttatcgaaattaatacgactcactatagggagacccaagcttggtaccgagctcggatccctacttccaatccaatgccaccatgggccagagatactactttaccgtgcatttcctgcctaaacaagccaatctggccctgctgacaggcagatgcatcagcatcatgcacggctttatcctgaagcacaacatcgagggaatgggcgttaccttcccagcctggtccgacagcagcatcggcaacgaaattgccttcgtgtacaccgacaaggaaatcctcaacacactgaaggaccaggcctacttcgtggatatgcaggattgcggcttcttcaaggtctcccaagtgctggctgtgcccgattcttgcgaggaagtgcggttcatccggaaccaggccgtggccaaaatcttcaccggagagagcagaagaaggctgaaaagactgcagaagagagccctggccagaggcgaagatttcaaccccaagaagatcgaggcccctcgggaaatcgatatcttccacagagtggccatgaccagcaagagctctcaggaggactacatcctgcacatccagaaacaggacgtggactgtcaggctgagccttactttagcaattacggcctggccagcaacgagaagttcaagggaacagtgcctgacctgagccccagcatcgacagaaacggctccggaaaacggacagccgacggaagcgagttcgagtcaccgaaaaagaagcgaaaagtttaatctagagggccctattctatagtgtcacctaaatgctagagctcgctgatcagcctcgactgtgccttctagttgccagccatctgttgtttgcccctcccccgtgccttccttgaccctggaaggtgccactcccactgtcctttcctaataaaatgaggaaattgcatcgcattgtctgagtaggtgtcattctattctggggggtggggtggggcaggacagcaagggggaggattgggaagacaatagcaggcatgctggggatgcggtgggctctatggcttctgaggcggaaagaaccagctggggctctagggggtatccccacgcgccctgtagcggcgcattaagcgcggcgggtgtggtggttacgcgcagcgtgaccgctacacttgccagcgccctagcgcccgctcctttcgctttcttcccttcctttctcgccacgttcgccggctttccccgtcaagctctaaatcggggcatccctttagggttccgatttagtgctttacggcacctcgaccccaaaaaacttgattagggtgatggttcacgtagtgggccatcgccctgatagacggtttttcgccctttgacgttggagtccacgttctttaatagtggactcttgttccaaactggaacaacactcaaccctatctcggtctattcttttgatttataagggattttggggatttcggcctattggttaaaaaatgagctgatttaacaaaaatttaacgcgaattaattctgtggaatgtgtgtcagttagggtgtggaaagtccccaggctccccaggcaggcagaagtatgcaaagcatgcatctcaattagtcagcaaccaggtgtggaaagtccccaggctccccagcaggcagaagtatgcaaagcatgcatctcaattagtcagcaaccatagtcccgcccctaactccgcccatcccgcccctaactccgcccagttccgcccattctccgccccatggctgactaattttttttatttatgcagaggccgaggccgcctctgcctctgagctattccagaagtagtgaggaggcttttttggaggcctaggcttttgcaaaaagctcccgggagcttgtatatccattttcggatctgatcaagagacaggatgaggatcgtttcgcatgattgaacaagatggattgcacgcaggttctccggccgcttgggtggagaggctattcggctatgactgggcacaacagacaatcggctgctctgatgccgccgtgttccggctgtcagcgcaggggcgcccggttctttttgtcaagaccgacctgtccggtgccctgaatgaactgcaggacgaggcagcgcggctatcgtggctggccacgacgggcgttccttgcgcagctgtgctcgacgttgtcactgaagcgggaagggactggctgctattgggcgaagtgccggggcaggatctcctgtcatctcaccttgctcctgccgagaaagtatccatcatggctgatgcaatgcggcggctgcatacgcttgatccggctacctgcccattcgaccaccaagcgaaacatcgcatcgagcgagcacgtactcggatggaagccggtcttgtcgatcaggatgatctggacgaagagcatcaggggctcgcgccagccgaactgttcgccaggctcaaggcgcgcatgcccgacggcgaggatctcgtcgtgacccatggcgatgcctgcttgccgaatatcatggtggaaaatggccgcttttctggattcatcgactgtggccggctgggtgtggcggaccgctatcaggacatagcgttggctacccgtgatattgctgaagagcttggcggcgaatgggctgaccgcttcctcgtgctttacggtatcgccgctcccgattcgcagcgcatcgccttctatcgccttcttgacgagttcttctgagcgggactctggggttcgaaatgaccgaccaagcgacgcccaacctgccatcacgagatttcgattccaccgccgccttctatgaaaggttgggcttcggaatcgttttccgggacgccggctggatgatcctccagcgcggggatctcatgctggagttcttcgcccaccccaacttgtttattgcagcttataatggttacaaataaagcaatagcatcacaaatttcacaaataaagcatttttttcactgcattctagttgtggtttgtccaaactcatcaatgtatcttatcatgtctgtataccgtcgacctctagctagagcttggcgtaatcatggtcatagctgtttcctgtgtgaaattgttatccgctcacaattccacacaacatacgagccggaagcataaagtgtaaagcctggggtgcctaatgagtgagctaactcacattaattgcgttgcgctcactgcccgctttccagtcgggaaacctgtcgtgccagctgcattaatgaatcggccaacgcgcggggagaggcggtttgcgtattgggcgctcttccgcttcctcgctcactgactcgctgcgctcggtcgttcggctgcggcgagcggtatcagctcactcaaaggcggtaatacggttatccacagaatcaggggataacgcaggaaagaacatgtgagcaaaaggccagcaaaaggccaggaaccgtaaaaaggccgcgttgctggcgtttttccataggctccgcccccctgacgagcatcacaaaaatcgacgctcaagtcagaggtggcgaaacccgacaggactataaagataccaggcgtttccccctggaagctccctcgtgcgctctcctgttccgaccctgccgcttaccggatacctgtccgcctttctcccttcgggaagcgtggcgctttctcaatgctcacgctgtaggtatctcagttcggtgtaggtcgttcgctccaagctgggctgtgtgcacgaaccccccgttcagcccgaccgctgcgccttatccggtaactatcgtcttgagtccaacccggtaagacacgacttatcgccactggcagcagccactggtaacaggattagcagagcgaggtatgtaggcggtgctacagagttcttgaagtggtggcctaactacggctacactagaaggacagtatttggtatctgcgctctgctgaagccagttaccttcggaaaaagagttggtagctcttgatccggcaaacaaaccaccgctggtagcggtggtttttttgtttgcaagcagcagattacgcgcagaaaaaaaggatctcaagaagatcctttgatcttttctacggggtctgacgctcagtggaacgaaaactcacgttaagggattttggtcatgagattatcaaaaaggatcttcacctagatccttttaaattaaaaatgaagttttaaatcaatctaaagtatatatgagtaaacttggtctgacagttaccaatgcttaatcagtgaggcacctatctcagcgatctgtctatttcgttcatccatagttgcctgactccccgtcgtgtagataactacgatacgggagggcttaccatctggccccagtgctgcaatgataccgcgagacccacgctcaccggctccagatttatcagcaataaaccagccagccggaagggccgagcgcagaagtggtcctgcaactttatccgcctccatccagtctattaattgttgccgggaagctagagtaagtagttcgccagttaatagtttgcgcaacgttgttgccattgctacaggcatcgtggtgtcacgctcgtcgtttggtatggcttcattcagctccggttcccaacgatcaaggcgagttacatgatcccccatgttgtgcaaaaaagcggttagctccttcggtcctccgatcgttgtcagaagtaagttggccgcagtgttatcactcatggttatggcagcactgcataattctcttactgtcatgccatccgtaagatgcttttctgtgactggtgagtactcaaccaagtcattctgagaatagtgtatgcggcgaccgagttgctcttgcccggcgtcaatacgggataataccgcgccacatagcagaactttaaaagtgctcatcattggaaaacgttcttcggggcgaaaactctcaaggatcttaccgctgttgagatccagttcgatgtaacccactcgtgcacccaactgatcttcagcatcttttactttcaccagcgtttctgggtgagcaaaaacaggaaggcaaaatgccgcaaaaaagggaataagggcgacacggaaatgttgaatactcatactcttcctttttcattattattgaagcatttatcagggttattgtctcatgagcggatacatatttgaatgtatttagaaaaataaacaaataggggttccgcgcacatttccccgaaaagtgccacctgacgtc

SEQ ID NO: 228 - DNA, 6466 bp, Artificial Sequence
  Synthetic
gacggatcgggagatctcccgatcccctatggtcgactctcagtacaatctgctctgatgccgcatagttaagccagtatctgctccctgcttgtgtgttggaggtcgctgagtagtgcgcgagcaaaatttaagctacaacaaggcaaggcttgaccgacaattgcatgaagaatctgcttagggttaggcgttttgcgctgcttcgcgatgtacgggccagatatacgcgttgacattgattattgactagttattaatagtaatcaattacggggtcattagttcatagcccatatatggagttccgcgttacataacttacggtaaatggcccgcctggctgaccgcccaacgacccccgcccattgacgtcaataatgacgtatgttcccatagtaacgccaatagggactttccattgacgtcaatgggtggactatttacggtaaactgcccacttggcagtacatcaagtgtatcatatgccaagtacgccccctattgacgtcaatgacggtaaatggcccgcctggcattatgcccagtacatgaccttatgggactttcctacttggcagtacatctacgtattagtcatcgctattaccatggtgatgcggttttggcagtacatcaatgggcgtggatagcggtttgactcacggggatttccaagtctccaccccattgacgtcaatgggagtttgttttggcaccaaaatcaacgggactttccaaaatgtcgtaacaactccgccccattgacgcaaatgggcggtaggcgtgtacggtgggaggtctatataagcagagctctctggctaactagagaacccactgcttactggcttatcgaaattaatacgactcactatagggagacccaagcttggtaccgagctcggatccctacttccaatccaatgccaccatgggcaacgccctgaccgagatccagatcgagaagctgaggaatttcagcgactgcatcgtgatgcacccacagatcaagacaatcttcaacgactttgatgagctgaggctgaatcgcaagtttcagtccgaccagcagtgtatgctgctgatcggcgataccggcgtgggcaagtctcacacaatcaaccactacaagaagcgggtgctggccacccagaactattccagaaatacaatgcccgtgctggtgtcccggatcagccggggcaagggcctggacgccaccctggtgcagatgctggccgatctggagctgttcggcagctcccagatcaagaagcggggctacaagaccgatctgacaaagaagctggtggagtctctgatcaaggcccaggtggagctgctgatcatcaacgagttccaggagctgatcgagtttaagtctgtgcaggagagacagcagatcgccaatggcctgaagtttatcagcgaggaggccaaggtgcctatcgtgctggtgggcatgccatgggcagcaaagatcgcagaggagccacagtgggcctctaggctggtgcggaagagaaagctggagtatttcagcctgaagaacgactccaagtactttcgccagtatctgatgggcctggccaagaagatgcctttcgatgtgccccctaagctggagagcaagaacaccacaatcgccctgtttgcagcatgcaggggagagaatcgcgccctgaagcacctgctgctggaggccctgaagctggccctgagctgtaacgagtacctggagaataagcacttcatcaccgcctatgacaagtttgatttctttaacgacaaggagaagctgaagtccaagaatcctttcaagcaggacatcaaggatatcgaaatctacgaagtgatcaagaacagcagctataacccaaatgccctggaccccgaggatatgctgacagatcgggtgtttgccatcgtgaagggctccggaaaacggacagccgacggaagcgagttcgagtcaccgaaaaagaagcgaaaagtttaatctagagggccctattctatagtgtcacctaaatgctagagctcgctgatcagcctcgactgtgccttctagttgccagccatctgttgtttgcccctcccccgtgccttccttgaccctggaaggtgccactcccactgtcctttcctaataaaatgaggaaattgcatcgcattgtctgagtaggtgtcattctattctggggggtggggtggggcaggacagcaagggggaggattgggaagacaatagcaggcatgctggggatgcggtgggctctatggcttctgaggcggaaagaaccagctggggctctagggggtatccccacgcgccctgtagcggcgcattaagcgcggcgggtgtggtggttacgcgcagcgtgaccgctacacttgccagcgccctagcgcccgctcctttcgctttcttcccttcctttctcgccacgttcgccggctttccccgtcaagctctaaatcggggcatccctttagggttccgatttagtgctttacggcacctcgaccccaaaaaacttgattagggtgatggttcacgtagtgggccatcgccctgatagacggtttttcgccctttgacgttggagtccacgttctttaatagtggactcttgttccaaactggaacaacactcaaccctatctcggtctattcttttgatttataagggattttggggatttcggcctattggttaaaaaatgagctgatttaacaaaaatttaacgcgaattaattctgtggaatgtgtgtcagttagggtgtggaaagtccccaggctccccaggcaggcagaagtatgcaaagcatgcatctcaattagtcagcaaccaggtgtggaaagtccccaggctccccagcaggcagaagtatgcaaagcatgcatctcaattagtcagcaaccatagtcccgcccctaactccgcccatcccgcccctaactccgcccagttccgcccattctccgccccatggctgactaattttttttatttatgcagaggccgaggccgcctctgcctctgagctattccagaagtagtgaggaggcttttttggaggcctaggcttttgcaaaaagctcccgggagcttgtatatccattttcggatctgatcaagagacaggatgaggatcgtttcgcatgattgaacaagatggattgcacgcaggttctccggccgcttgggtggagaggctattcggctatgactgggcacaacagacaatcggctgctctgatgccgccgtgttccggctgtcagcgcaggggcgcccggttctttttgtcaagaccgacctgtccggtgccctgaatgaactgcaggacgaggcagcgcggctatcgtggctggccacgacgggcgttccttgcgcagctgtgctcgacgttgtcactgaagcgggaagggactggctgctattgggcgaagtgccggggcaggatctcctgtcatctcaccttgctcctgccgagaaagtatccatcatggctgatgcaatgcggcggctgcatacgcttgatccggctacctgcccattcgaccaccaagcgaaacatcgcatcgagcgagcacgtactcggatggaagccggtcttgtcgatcaggatgatctggacgaagagcatcaggggctcgcgccagccgaactgttcgccaggctcaaggcgcgcatgcccgacggcgaggatctcgtcgtgacccatggcgatgcctgcttgccgaatatcatggtggaaaatggccgcttttctggattcatcgactgtggccggctgggtgtggcggaccgctatcaggacatagcgttggctacccgtgatattgctgaagagcttggcggcgaatgggctgaccgcttcctcgtgctttacggtatcgccgctcccgattcgcagcgcatcgccttctatcgccttcttgacgagttcttctgagcgggactctggggttcgaaatgaccgaccaagcgacgcccaacctgccatcacgagatttcgattccaccgccgccttctatgaaaggttgggcttcggaatcgttttccgggacgccggctggatgatcctccagcgcggggatctcatgctggagttcttcgcccaccccaacttgtttattgcagcttataatggttacaaataaagcaatagcatcacaaatttcacaaataaagcatttttttcactgcattctagttgtggtttgtccaaactcatcaatgtatcttatcatgtctgtataccgtcgacctctagctagagcttggcgtaatcatggtcatagctgtttcctgtgtgaaattgttatccgctcacaattccacacaacatacgagccggaagcataaagtgtaaagcctggggtgcctaatgagtgagctaactcacattaattgcgttgcgctcactgcccgctttccagtcgggaaacctgtcgtgccagctgcattaatgaatcggccaacgcgcggggagaggcggtttgcgtattgggcgctcttccgcttcctcgctcactgactcgctgcgctcggtcgttcggctgcggcgagcggtatcagctcactcaaaggcggtaatacggttatccacagaatcaggggataacgcaggaaagaacatgtgagcaaaaggccagcaaaaggccaggaaccgtaaaaaggccgcgttgctggcgtttttccataggctccgcccccctgacgagcatcacaaaaatcgacgctcaagtcagaggtggcgaaacccgacaggactataaagataccaggcgtttccccctggaagctccctcgtgcgctctcctgttccgaccctgccgcttaccggatacctgtccgcctttctcccttcgggaagcgtggcgctttctcaatgctcacgctgtaggtatctcagttcggtgtaggtcgttcgctccaagctgggctgtgtgcacgaaccccccgttcagcccgaccgctgcgccttatccggtaactatcgtcttgagtccaacccggtaagacacgacttatcgccactggcagcagccactggtaacaggattagcagagcgaggtatgtaggcggtgctacagagttcttgaagtggtggcctaactacggctacactagaaggacagtatttggtatctgcgctctgctgaagccagttaccttcggaaaaagagttggtagctcttgatccggcaaacaaaccaccgctggtagcggtggtttttttgtttgcaagcagcagattacgcgcagaaaaaaaggatctcaagaagatcctttgatcttttctacggggtctgacgctcagtggaacgaaaactcacgttaagggattttggtcatgagattatcaaaaaggatcttcacctagatccttttaaattaaaaatgaagttttaaatcaatctaaagtatatatgagtaaacttggtctgacagttaccaatgcttaatcagtgaggcacctatctcagcgatctgtctatttcgttcatccatagttgcctgactccccgtcgtgtagataactacgatacgggagggcttaccatctggccccagtgctgcaatgataccgcgagacccacgctcaccggctccagatttatcagcaataaaccagccagccggaagggccgagcgcagaagtggtcctgcaactttatccgcctccatccagtctattaattgttgccgggaagctagagtaagtagttcgccagttaatagtttgcgcaacgttgttgccattgctacaggcatcgtggtgtcacgctcgtcgtttggtatggcttcattcagctccggttcccaacgatcaaggcgagttacatgatcccccatgttgtgcaaaaaagcggttagctccttcggtcctccgatcgttgtcagaagtaagttggccgcagtgttatcactcatggttatggcagcactgcataattctcttactgtcatgccatccgtaagatgcttttctgtgactggtgagtactcaaccaagtcattctgagaatagtgtatgcggcgaccgagttgctcttgcccggcgtcaatacgggataataccgcgccacatagcagaactttaaaagtgctcatcattggaaaacgttcttcggggcgaaaactctcaaggatcttaccgctgttgagatccagttcgatgtaacccactcgtgcacccaactgatcttcagcatcttttactttcaccagcgtttctgggtgagcaaaaacaggaaggcaaaatgccgcaaaaaagggaataagggcgacacggaaatgttgaatactcatactcttcctttttcattattattgaagcatttatcagggttattgtctcatgagcggatacatatttgaatgtatttagaaaaataaacaaataggggttccgcgcacatttccccgaaaagtgccacctgacgtc

SEQ ID NO: 229 - DNA, 3090 bp, Artificial Sequence
  Synthetic
ttgagatcctttttttctgcgcgtaatctgctgcttgcaaacaaaaaaaccaccgctaccagcggtggtttgtttgccggatcaagagctaccaactctttttccgaaggtaactggcttcagcagagcgcagataccaaatactgttcttctagtgtagccgtagttaggccaccacttcaagaactctgtagcaccgcctacatacctcgctctgctaatcctgttaccagtggctgctgccagtggcgataagtcgtgtcttaccgggttggactcaagacgatagttaccggataaggcgcagcggtcgggctgaacggggggttcgtgcacacagcccagcttggagcgaacgacctacaccgaactgagatacctacagcgtgagctatgagaaagcgccacgcttcccgaagggagaaaggcggacaggtatccggtaagcggcagggtcggaacaggagagcgcacgagggagcttccagggggaaacgcctggtatctttatagtcctgtcgggtttcgccacctctgacttgagcgtcgatttttgtgatgctcgtcaggggggcggagcctatggaaaaacgccagcaacgcggcctttttacggttcctggccttttgctggccttttgctcacatgttctttcctgcgttatcccctgattctgtggataaccgtattaccgcctttgagtgagctgataccgctcgccgcagccgaacgaccgagcgcagcgagtcagtgagcgaggaagcggaagagcgtgttgatcggctttaaggatctagtgtcgctgcaaccatagtttgacataatgcaaccataccttgacataattaaagtcatactctgacataaagccccttattaaaaatgatgctaaaaataaattccattataatcaattatttaagaattaattaaaccatagtgtgacatagtggcgatcggcacgtaagaggttccaactttcaccataatgaaataagatcactaccgggcgtattttttgagttatcgagattttcaggagctaaggaagctaaaatggagaaaaaaatcactggatataccaccgttgatatatcccaatggcatcgtaaagaacattttgaggcatttcagtcagttgctcaatgtacctataaccagaccgttcagctggatattacggcctttttaaagaccgtaaagaaaaataagcacaagttttatccggcctttattcacattcttgcccgcctgatgaatgctcatccggagttccgtatggcaatgaaagacggtgagctggtgatatgggatagtgttcacccttgttacaccgttttccatgagcaaactgaaacgttttcatcgctctggagtgaataccacgacgatttccggcagtttctacacatatattcgcaagatgtggcgtgttacggtgaaaacctggcctatttccctaaagggtttattgagaatatgtttttcgtctcagccaatccctgggtgagtttcaccagttttgatttaaacgtggccaatatggacaacttcttcgcccccgttttcactatgggcaaatattatacgcaaggcgacaaggtgctgatgccgctggcgattcaggttcatcatgccgtctgtgatggcttccatgtcggcagaatgcttaatgaattacaacagtactgcgatgagtggcagggcggggcgtaatttttttaaggcagttattggtgcccttctagagtcggctggtttttttgtttttagcgttataacttttatttcactatgtcactgtatggttgcattttatgtcagtgaatggttgcaggttttttgtaagttattgatatgcctatccagtgtatgtcacgctttgcttgcagcgacatctaggatcttagcgcgcttttatggacgtcaggtggcacttttcggggaaatgtgcgcggaacccctatttgtttatttttctaaatacattcaaatatgtatccgctcatgagacaataaccctgataaatgcttcaataatattgaaaaaggaagagtatgagtattcaacatttccgtgtcgcccttattcccttttttgcggcattttgccttcctgtttttgctcacccagaaacgctggtgaaagtaaaagatgctgaagatcagttgggtgcacgagtgggttacatcgaactggatctcaacagcggtaagatccttgagagttttcgccccgaagaacgttttccaatgatgagcacttttaaagttctgctatgtggcgcggtattatcccgtattgacgccgggcaagagcaactcggtcgccgcatacactattctcagaatgacttggttgagtactcaccagtcacagaaaagcatcttacggatggcatgacagtaagagaattatgcagtgctgccataaccatgagtgataacactgcggccaacttacttctgacaacgatcggaggaccgaaggagctaaccgcttttttgcacaacatgggggatcatgtaactcgccttgatcgttgggaaccggagctgaatgaagccataccaaacgacgagcgtgacaccacgatgcctgtagcaatggcaacaacgttgcgcaaactattaactggcgaactacttactctagcttcccggcaacaattaatagactggatggaggcggataaagttgcaggaccacttctgcgctcggcccttccggctggctggtttattgctgataaatctggagccggtgagcgtgggtctcgcggtatcattgcagcactggggccagatggtaagccctcccgtatcgtagttatctacacgacggggagtcaggcaactatggatgaacgaaatagacagatcgctgagataggtgcctcactgattaagcattggtaactgtcagaccaagtttactcatatatactttagattgatttaaaacttcatttttaatttaaaaggatctaggtgaagatcctttttgataatctcatgaccaaaatcccttaacgtgagttttcgttccactgagcgtcagaccccgtagaaaagatcaaaggatcttc

SEQ ID NO: 230 - DNA, 3008 bp, Artificial Sequence
  Synthetic
ttgagatcctttttttctgcgcgtaatctgctgcttgcaaacaaaaaaaccaccgctaccagcggtggtttgtttgccggatcaagagctaccaactctttttccgaaggtaactggcttcagcagagcgcagataccaaatactgttcttctagtgtagccgtagttaggccaccacttcaagaactctgtagcaccgcctacatacctcgctctgctaatcctgttaccagtggctgctgccagtggcgataagtcgtgtcttaccgggttggactcaagacgatagttaccggataaggcgcagcggtcgggctgaacggggggttcgtgcacacagcccagcttggagcgaacgacctacaccgaactgagatacctacagcgtgagctatgagaaagcgccacgcttcccgaagggagaaaggcggacaggtatccggtaagcggcagggtcggaacaggagagcgcacgagggagcttccagggggaaacgcctggtatctttatagtcctgtcgggtttcgccacctctgacttgagcgtcgatttttgtgatgctcgtcaggggggcggagcctatggaaaaacgccagcaacgcggcctttttacggttcctggccttttgctggccttttgctcacatgttctttcctgcgttatcccctgattctgtggataaccgtattaccgcctttgagtgagctgataccgctcgccgcagccgaacgaccgagcgcagcgagtcagtgagcgaggaagcggaagagcgtgttgatcggctttaaggatctagtgtcgctgcaaccatagtttgacataatgcaaccataccttgacataattaaagtcatactctgacataaagcccgatcggcacgtaagaggttccaactttcaccataatgaaataagatcactaccgggcgtattttttgagttatcgagattttcaggagctaaggaagctaaaatggagaaaaaaatcactggatataccaccgttgatatatcccaatggcatcgtaaagaacattttgaggcatttcagtcagttgctcaatgtacctataaccagaccgttcagctggatattacggcctttttaaagaccgtaaagaaaaataagcacaagttttatccggcctttattcacattcttgcccgcctgatgaatgctcatccggagttccgtatggcaatgaaagacggtgagctggtgatatgggatagtgttcacccttgttacaccgttttccatgagcaaactgaaacgttttcatcgctctggagtgaataccacgacgatttccggcagtttctacacatatattcgcaagatgtggcgtgttacggtgaaaacctggcctatttccctaaagggtttattgagaatatgtttttcgtctcagccaatccctgggtgagtttcaccagttttgatttaaacgtggccaatatggacaacttcttcgcccccgttttcactatgggcaaatattatacgcaaggcgacaaggtgctgatgccgctggcgattcaggttcatcatgccgtctgtgatggcttccatgtcggcagaatgcttaatgaattacaacagtactgcgatgagtggcagggcggggcgtaatttttttaaggcagttattggtgcccttctagagtcggctggtttttttgtttttagcgttataacttttatttcactatgtcactgtatggttgcattttatgtcagtgaatggttgcaggttttttgtaagttattgatatgcctatccagtgtatgtcacgctttgcttgcagcgacatctaggatcttagcgcgcttttatggacgtcaggtggcacttttcggggaaatgtgcgcggaacccctatttgtttatttttctaaatacattcaaatatgtatccgctcatgagacaataaccctgataaatgcttcaataatattgaaaaaggaagagtatgagtattcaacatttccgtgtcgcccttattcccttttttgcggcattttgccttcctgtttttgctcacccagaaacgctggtgaaagtaaaagatgctgaagatcagttgggtgcacgagtgggttacatcgaactggatctcaacagcggtaagatccttgagagttttcgccccgaagaacgttttccaatgatgagcacttttaaagttctgctatgtggcgcggtattatcccgtattgacgccgggcaagagcaactcggtcgccgcatacactattctcagaatgacttggttgagtactcaccagtcacagaaaagcatcttacggatggcatgacagtaagagaattatgcagtgctgccataaccatgagtgataacactgcggccaacttacttctgacaacgatcggaggaccgaaggagctaaccgcttttttgcacaacatgggggatcatgtaactcgccttgatcgttgggaaccggagctgaatgaagccataccaaacgacgagcgtgacaccacgatgcctgtagcaatggcaacaacgttgcgcaaactattaactggcgaactacttactctagcttcccggcaacaattaatagactggatggaggcggataaagttgcaggaccacttctgcgctcggcccttccggctggctggtttattgctgataaatctggagccggtgagcgtgggtctcgcggtatcattgcagcactggggccagatggtaagccctcccgtatcgtagttatctacacgacggggagtcaggcaactatggatgaacgaaatagacagatcgctgagataggtgcctcactgattaagcattggtaactgtcagaccaagtttactcatatatactttagattgatttaaaacttcatttttaatttaaaaggatctaggtgaagatcctttttgataatctcatgaccaaaatcccttaacgtgagttttcgttccactgagcgtcagaccccgtagaaaagatcaaaggatcttc

SEQ ID NO: 231 - DNA, 2990 bp, Artificial Sequence
  Synthetic
ttgagatcctttttttctgcgcgtaatctgctgcttgcaaacaaaaaaaccaccgctaccagcggtggtttgtttgccggatcaagagctaccaactctttttccgaaggtaactggcttcagcagagcgcagataccaaatactgttcttctagtgtagccgtagttaggccaccacttcaagaactctgtagcaccgcctacatacctcgctctgctaatcctgttaccagtggctgctgccagtggcgataagtcgtgtcttaccgggttggactcaagacgatagttaccggataaggcgcagcggtcgggctgaacggggggttcgtgcacacagcccagcttggagcgaacgacctacaccgaactgagatacctacagcgtgagctatgagaaagcgccacgcttcccgaagggagaaaggcggacaggtatccggtaagcggcagggtcggaacaggagagcgcacgagggagcttccagggggaaacgcctggtatctttatagtcctgtcgggtttcgccacctctgacttgagcgtcgatttttgtgatgctcgtcaggggggcggagcctatggaaaaacgccagcaacgcggcctttttacggttcctggccttttgctggccttttgctcacatgttctttcctgcgttatcccctgattctgtggataaccgtattaccgcctttgagtgagctgataccgctcgccgcagccgaacgaccgagcgcagcgagtcagtgagcgaggaagcggaagagcgtgttgatcggctttaaggatctagtgtcgctgcaaccatagtttgacataatgcaaccataccttgacataattaaagtcagatcggcacgtaagaggttccaactttcaccataatgaaataagatcactaccgggcgtattttttgagttatcgagattttcaggagctaaggaagctaaaatggagaaaaaaatcactggatataccaccgttgatatatcccaatggcatcgtaaagaacattttgaggcatttcagtcagttgctcaatgtacctataaccagaccgttcagctggatattacggcctttttaaagaccgtaaagaaaaataagcacaagttttatccggcctttattcacattcttgcccgcctgatgaatgctcatccggagttccgtatggcaatgaaagacggtgagctggtgatatgggatagtgttcacccttgttacaccgttttccatgagcaaactgaaacgttttcatcgctctggagtgaataccacgacgatttccggcagtttctacacatatattcgcaagatgtggcgtgttacggtgaaaacctggcctatttccctaaagggtttattgagaatatgtttttcgtctcagccaatccctgggtgagtttcaccagttttgatttaaacgtggccaatatggacaacttcttcgcccccgttttcactatgggcaaatattatacgcaaggcgacaaggtgctgatgccgctggcgattcaggttcatcatgccgtctgtgatggcttccatgtcggcagaatgcttaatgaattacaacagtactgcgatgagtggcagggcggggcgtaatttttttaaggcagttattggtgcccttctagagtcggctggtttttttgtttttagcgttataacttttatttcactatgtcactgtatggttgcattttatgtcagtgaatggttgcaggttttttgtaagttattgatatgcctatccagtgtatgtcacgctttgcttgcagcgacatctaggatcttagcgcgcttttatggacgtcaggtggcacttttcggggaaatgtgcgcggaacccctatttgtttatttttctaaatacattcaaatatgtatccgctcatgagacaataaccctgataaatgcttcaataatattgaaaaaggaagagtatgagtattcaacatttccgtgtcgcccttattcccttttttgcggcattttgccttcctgtttttgctcacccagaaacgctggtgaaagtaaaagatgctgaagatcagttgggtgcacgagtgggttacatcgaactggatctcaacagcggtaagatccttgagagttttcgccccgaagaacgttttccaatgatgagcacttttaaagttctgctatgtggcgcggtattatcccgtattgacgccgggcaagagcaactcggtcgccgcatacactattctcagaatgacttggttgagtactcaccagtcacagaaaagcatcttacggatggcatgacagtaagagaattatgcagtgctgccataaccatgagtgataacactgcggccaacttacttctgacaacgatcggaggaccgaaggagctaaccgcttttttgcacaacatgggggatcatgtaactcgccttgatcgttgggaaccggagctgaatgaagccataccaaacgacgagcgtgacaccacgatgcctgtagcaatggcaacaacgttgcgcaaactattaactggcgaactacttactctagcttcccggcaacaattaatagactggatggaggcggataaagttgcaggaccacttctgcgctcggcccttccggctggctggtttattgctgataaatctggagccggtgagcgtgggtctcgcggtatcattgcagcactggggccagatggtaagccctcccgtatcgtagttatctacacgacggggagtcaggcaactatggatgaacgaaatagacagatcgctgagataggtgcctcactgattaagcattggtaactgtcagaccaagtttactcatatatactttagattgatttaaaacttcatttttaatttaaaaggatctaggtgaagatcctttttgataatctcatgaccaaaatcccttaacgtgagttttcgttccactgagcgtcagaccccgtagaaaagatcaaaggatcttc

SEQ ID NO: 232 - DNA, 10693 bp, Artificial Sequence
  Synthetic
gacggatcgggagatctcccgatcccctatggtgcactctcagtacaatctgctctgatgccgcatagttaagccagtatctgctccctgcttgtgtgttggaggtcgctgagtagtgcgcgagcaaaatttaagctacaacaaggcaaggcttgaccgacaattgcatgaagaatctgcttagggttaggcgttttgcgctgcttcgcgatgtacgggccagatatacgcgttgacattgattattgactagttattaatagtaatcaattacggggtcattagttcatagcccatatatggagttccgcgttacataacttacggtaaatggcccgcctggctgaccgcccaacgacccccgcccattgacgtcaataatgacgtatgttcccatagtaacgccaatagggactttccattgacgtcaatgggtggagtatttacggtaaactgcccacttggcagtacatcaagtgtatcatatgccaagtacgccccctattgacgtcaatgacggtaaatggcccgcctggcattatgcccagtacatgaccttatgggactttcctacttggcagtacatctacgtattagtcatcgctattaccatggtgatgcggttttggcagtacatcaatgggcgtggatagcggtttgactcacggggatttccaagtctccaccccattgacgtcaatgggagtttgttttggcaccaaaatcaacgggactttccaaaatgtcgtaacaactccgccccattgacgcaaatgggcggtaggcgtgtacggtgggaggtctatataagcagagctctctggctaactagagaacccactgcttactggcttatcgaaattaatacgactcactatagggagacccaagctgaaacttaagcttaccggtagccaccatggggcccaagaagaaaaggaaggtcggctccggcatgacacggttcgtccagctgcatctgctgacttcctaccctcccgcaaacctgaaccgggacgatctgggcaatcctaagacagccagactgggaggagtggagcggctgcgggtgagcagccagagcctgaagagggcatggcggacatccgagctgtttcagcagcagctggccggcaccatcggcaccagaacaaagaggctgggcatcgaggtgttcgaggccctgctgggagccggagtgaccgagaagcaggcaagagagtgggcaggacagatcgccaaggtgtatggagccgccaagaaggataacccactggagatcgagcagctggtgcacatcgcccccgaggagagggccagcctggaccagctggtggccacactggccgcagagaagaggggaccaaccgacgaggagctggatgccctgctgcaccaccagacagccgtggacatcgccatgtttggccggatgctggccagcaagacccagttcaatggagaggcagcagtgcaggtggcacacgcaatcggagtgcacgcctccgccatcgaggacgattacttcaccgccgtggacgatctgaacagaaatgatccaggagccgcacacatcggagagtccggctttgcagccgccgtgttctaccagtatatctgcatcgaccgggatctgctgaagagaaacctgggcggcgacgaggtgctgacacagaaggccctgagggccctgaccgaggccgccctgaaggtcggacctagcggcaagcagaacagcttcgccagcagggcctttgcccacttcgccctggccgagaagggcacagatcagcctagaagcctgtccctggccttcgtgaagccagtggccggcaccgactacgcaggcgatgcagtggccgccctgcagcaggtgcgggacaacatggataaggtgtatggcgtgtgcgccgagagcagatgtcagtttaatgtgctgacaggcgagggctccgtggcagacctgctggatttcgtggcagcagaggctagctcgccagggatccgtcgacttgacgcgttgatatcaacaagtttgtacaaaaaagcaggctacaaagaggccagcggttccggacgggctgacgcattggacgattttgatctggatatgctgggaagtgacgccctcgatgattttgaccttgacatgcttggttcggatgcccttgatgactttgacctcgacatgctcggcagtgacgcccttgatgatttcgacctggacatgctgattaactctagaggcggcgagggaaggggctctctgctgacctgcggcgacgtggaggagaaccctggacctggaccgaaaaagaagcgaaaagttggatccggcatgaagcctcgcaagccacggctgaatgaggcccagcagagatgggtgagggattggtggagggccctgcagccaagggcagagggcgacgagcctatcccaggcgagctgagcgtgatgggaaggggagagcgggcccagctgcggagatgtaccgacgccgatgagctgctgacacagtccgccaccctgctgctggcccacaggctggtggccctgaacggagagaggggaccactgcctgataattctctgagctatgagaggatggcatgggtggcaggcgtgctggccaacgtgaaggacgatctgcgcgatggcaagtccctggccacccacctgggacaggcagcagacgccgagaggccacccatgtctgagctgcgctttcgggcaatgcagaggggcacagcaatgcaggagctgttcctgcactggaggcgcgccctgcagctggccggaggcaagaccgacgtggcacacctggcagacgatctgctgagctggcagatcgagcagggacagagcgccgcacaggcctccaatggcgtgaagtttcactgggcctacgactactatctgtctgccagagatagggccgccgccaaggagcctgagttcaacaaggagatatccaaggggtccggcgaaggaaggggcagcctgctgacatgcggcgatgtggaggagaaccctggacctgctccaaaaaagaaacgcaaggtgggcagcggcatgaccgactacctgctgctgagactgtatggcccactggcctcctggggagagatcgcagtgggagagagcaggcactccgccgtgcagccatccagatctgccctgctgggcctgctgggggccgccctgggcatcgagagacacgacgatgcagcacagcaggccctggtggatggctacaggttcgccatcaagctggagtgtatcggctctcccctgcgcgactatcacaccgtgcaagtgggcgtgccccctaggaagttccagtttagaagccggagacaggagctggccgcagacaaggtggatacaatcctgtctaccagagagtataggtgcgatagcctggccctggtggcagtggaggccctgccaggggcccccgtggacctggccagcctggccgaggccctgcgcaagcctaggtttgccctgtacctgggaaggaagtcctgtccactggccctgccactgtctcccaagatcctggccgcctctagcgtgagagaggtgttcgataacctggagctgccctctctgctgggcctgctggacagataccagccagagcaggcctggccaagcaggcaggatcagcaggccctgaggcctggagtggcaaggtactattgggaggacggcatgacagcaggaatggccccctcctttgaggcacagaggcacgatcagcctctgtctcggcggcggtggcagttcgcaccaagaagggagtgggtggccctgaacgatggaggacagagcggctcgagcgagggaaggggctccctgctgacttgtggcgacgtggaggagaaccctggacctagccctaaaaaaaagcggaaggtaggtaccggcatgagccactatttttccctggtgaggctgatcggctctcccaggcacgacgcatggctgcgggatctgagcagacacggcgaggcctaccgggaccacgcactgatctggagactgttcccaggcgacggagccgcaagggatttcgtgtttcgccggctggaggatgagaagtctttttatgtggtgagcgccagacctccacaggcagacgcaggcctgttccacatccagtctaaggcctacagccctgagctggccgagggcgactgggtgaggttcgatctgcgcgccaacccaacagtgagcgtgagaagggagaatggcagatcccagaggcacgatgtgctgatgcacgccaagcagctggcctccaccgagaagtctgccctgcccgagcggctggaggcagcaggaagagagtggctgaaggacagggcagagcggtggggcctggacctgagaaccgattccctgatgcagaacggctacagacagcagaggctgaagcgcaagggcaagcacatcgccttttctacactggactatcagggcatcgcccaagtgaccgatcctgagcagctgcgccgggccctgctggacggagtgggacactccaagggattcggatgcggcctgctgctggtgaagagggtggatggtaaccaggagggaagaggctccctgctgacatgtggcgacgtggaagaaaaccctggacctggcccgaagaaaaaacgtaaagtgggctccggaatggacctgctgtccgatacatggctgcagtgcaggcacagggacggcaccctgaagcctatcgccatcggccagatcggcctggaggactgtctggagctggtggccccccggcccgacttccggggggccctgtaccagttcctgatcggcctgctgcagacagcctatgcccctgaggacctgcaggagtggagagataggtacgcaaacccaccaaccgcagacgatctggcagaggtgtttgccccctatagggatgccttccagctggagaacagcggccctacattcatgcaggacctgaccctgcccgacgatgtgaatcagctgcctgtgctggagctgctgatcgacgccggcagctcctctaaccagtactttaataagcctgcagtggagcacggaatgtgcgagggctgtttcacacaggccctgctgaccatgcagctgaatgcaccatctggcggaaggggcatcagaacaagcctgcgcggaggaggaccactgaccacactgctggtgcccgcagagcagaacgccaccctgtggcagaagctgtggctgaatgtgctgccactggacgcactggatcaccctccaatcaagatgctgtccgatgtgctgccctggctggcccctaccaggacatctgacgataagcagggccaggacacaccccctgagagcgtgcacccactgcaggcctactggtccatgccaaggcggatcagactggacgcagccaccctggaccagggcgattgcgccgtgtgcggggcccagaacgtgaagcgcatccggcactacagaacaaggcacggcggcaccaattataccggcacatggacccaccctctgaccccatatagcctggattccaagggcgagaagccaccactgagcatcaagggcaggcaggcaggaaggggctaccgcgactggctgggcctggtgctgggaaacgaggaccaccagccagatgcagcacaggtggtgcggcacttcacagcaaagctgggcaagccttccgtgagactgtggtgctttggcttcgacatgtctaatatgaaggccctgtgctggtacgatagcctgctgcctgtgcacggcgtggccccagacgtgcagaggaagtttacccgcagcgtgaagcaggtgctggacagcgccaacgatatggcctccgtgctgcacaagcaggtgaaggcagcatggttcagaaggcctggcgacgcaggacaggagccagcagtgacacagagcttttggcagggcagcgagacagccttctatcaggtgctggagcagctgtctaagctggactttgatagcgccgcagagctggccgcaatctacagggcatggctgcaggcaacacgccggctggtgctgtccctgttcgatcactgggtgctgtctggccccctggaggacatggatatgcagagggtggtgaaggcaagagcagacctggccaaggagctgaataccgggaaagcccagaagccactgtggactattgtgaaccagcatctgaaagagcagggttaacgatagaattctctagagggcccgtttaaacccgctgatcagcctcgactgtgccttctagttgccagccatctgttgtttgcccctcccccgtgccttccttgaccctggaaggtgccactcccactgtcctttcctaataaaatgaggaaattgcatcgcattgtctgagtaggtgtcattctattctggggggtggggtggggcaggacagcaagggggaggattgggaagacaatagcaggcatgctggggatgcggtgggctctatggcttctgaggcggaaagaaccagctggggctctagggggtatccccacgcgccctgtagcggcgcattaagcgcggcgggtgtggtggttacgcgcagcgtgaccgctacacttgccagcgccctagcgcccgctcctttcgctttcttcccttcctttctcgccacgttcgccggctttccccgtcaagctctaaatcgggggctccctttagggttccgatttagtgctttacggcacctcgaccccaaaaaacttgattagggtgatggttcacgtagtgggccatcgccctgatagacggtttttcgccctttgacgttggagtccacgttctttaatagtggactcttgttccaaactggaacaacactcaaccctatctcggtctattcttttgatttataagggattttgccgatttcggcctattggttaaaaaatgagctgatttaacaaaaatttaacgcgaattaattctgtggaatgtgtgtcagttagggtgtggaaagtccccaggctccccagcaggcagaagtatgcaaagcatgcatctcaattagtcagcaaccaggtgtggaaagtccccaggctccccagcaggcagaagtatgcaaagcatgcatctcaattagtcagcaaccatagtcccgcccctaactccgcccatcccgcccctaactccgcccagttccgcccattctccgccccatggctgactaattttttttatttatgcagaggccgaggccgcctctgcctctgagctattccagaagtagtgaggaggcttttttggaggcctaggcttttgcaaaaagctcccgggagcttgtatatccattttcggatctgatcaagagacaggatgaggatcgtttcgcatgattgaacaagatggattgcacgcaggttctccggccgcttgggtggagaggctattcggctatgactgggcacaacagacaatcggctgctctgatgccgccgtgttccggctgtcagcgcaggggcgcccggttctttttgtcaagaccgacctgtccggtgccctgaatgaactgcaggacgaggcagcgcggctatcgtggctggccacgacgggcgttccttgcgcagctgtgctcgacgttgtcactgaagcgggaagggactggctgctattgggcgaagtgccggggcaggatctcctgtcatctcaccttgctcctgccgagaaagtatccatcatggctgatgcaatgcggcggctgcatacgcttgatccggctacctgcccattcgaccaccaagcgaaacatcgcatcgagcgagcacgtactcggatggaagccggtcttgtcgatcaggatgatctggacgaagagcatcaggggctcgcgccagccgaactgttcgccaggctcaaggcgcgcatgcccgacggcgaggatctcgtcgtgacccatggcgatgcctgcttgccgaatatcatggtggaaaatggccgcttttctggattcatcgactgtggccggctgggtgtggcggaccgctatcaggacatagcgttggctacccgtgatattgctgaagagcttggcggcgaatgggctgaccgcttcctcgtgctttacggtatcgccgctcccgattcgcagcgcatcgccttctatcgccttcttgacgagttcttctgagcgggactctggggttcgaaatgaccgaccaagcgacgcccaacctgccatcacgagatttcgattccaccgccgccttctatgaaaggttgggcttcggaatcgttttccgggacgccggctggatgatcctccagcgcggggatctcatgctggagttcttcgcccaccccaacttgtttattgcagcttataatggttacaaataaagcaatagcatcacaaatttcacaaataaagcatttttttcactgcattctagttgtggtttgtccaaactcatcaatgtatcttatcatgtctgtataccgtcgacctctagctagagcttggcgtaatcatggtcatagctgtttcctgtgtgaaattgttatccgctcacaattccacacaacatacgagccggaagcataaagtgtaaagcctggggtgcctaatgagtgagctaactcacattaattgcgttgcgctcactgcccgctttccagtcgggaaacctgtcgtgccagctgcattaatgaatcggccaacgcgcggggagaggcggtttgcgtattgggcgctcttccgcttcctcgctcactgactcgctgcgctcggtcgttcggctgcggcgagcggtatcagctcactcaaaggcggtaatacggttatccacagaatcaggggataacgcaggaaagaacatgtgagcaaaaggccagcaaaaggccaggaaccgtaaaaaggccgcgttgctggcgtttttccataggctccgcccccctgacgagcatcacaaaaatcgacgctcaagtcagaggtggcgaaacccgacaggactataaagataccaggcgtttccccctggaagctccctcgtgcgctctcctgttccgaccctgccgcttaccggatacctgtccgcctttctcccttcgggaagcgtggcgctttctcatagctcacgctgtaggtatctcagttcggtgtaggtcgttcgctccaagctgggctgtgtgcacgaaccccccgttcagcccgaccgctgcgccttatccggtaactatcgtcttgagtccaacccggtaagacacgacttatcgccactggcagcagccactggtaacaggattagcagagcgaggtatgtaggcggtgctacagagttcttgaagtggtggcctaactacggctacactagaagaacagtatttggtatctgcgctctgctgaagccagttaccttcggaaaaagagttggtagctcttgatccggcaaacaaaccaccgctggtagcggtttttttgtttgcaagcagcagattacgcgcagaaaaaaaggatctcaagaagatcctttgatcttttctacggggtctgacgctcagtggaacgaaaactcacgttaagggattttggtcatgagattatcaaaaaggatcttcacctagatccttttaaattaaaaatgaagttttaaatcaatctaaagtatatatgagtaaacttggtctgacagttaccaatgcttaatcagtgaggcacctatctcagcgatctgtctatttcgttcatccatagttgcctgactccccgtcgtgtagataactacgatacgggagggcttaccatctggccccagtgctgcaatgataccgcgagacccacgctcaccggctccagatttatcagcaataaaccagccagccggaagggccgagcgcagaagtggtcctgcaactttatccgcctccatccagtctattaattgttgccgggaagctagagtaagtagttcgccagttaatagtttgcgcaacgttgttgccattgctacaggcatcgtggtgtcacgctcgtcgtttggtatggcttcattcagctccggttcccaacgatcaaggcgagttacatgatcccccatgttgtgcaaaaaagcggttagctccttcggtcctccgatcgttgtcagaagtaagttggccgcagtgttatcactcatggttatggcagcactgcataattctcttactgtcatgccatccgtaagatgcttttctgtgactggtgagtactcaaccaagtcattctgagaatagtgtatgcggcgaccgagttgctcttgcccggcgtcaatacgggataataccgcgccacatagcagaactttaaaagtgctcatcattggaaaacgttcttcggggcgaaaactctcaaggatcttaccgctgttgagatccagttcgatgtaacccactcgtgcacccaactgatcttcagcatcttttactttcaccagcgtttctgggtgagcaaaaacaggaaggcaaaatgccgcaaaaaagggaataagggcgacacggaaatgttgaatactcatactcttcctttttcaatattattgaagcatttatcagggttattgtctcatgagcggatacatatttgaatgtatttagaaaaataaacaaataggggttccgcgcacatttccccgaaaagtgccacctgacgtc

SEQ ID NO: 233 - DNA, 4796 bp, Artificial Sequence
  Synthetic
gacggatcgggagatctcccgatcccctatggtcgactctcagtacaatctgctctgatgccgcatagttaagccagtatctgctccctgcttgtgtgttggaggtcgctgagtagtgcgcgagcaaaatttaagctacaacaaggcaaggcttgaccgacaattgcatgaagaatctgcttagggttaggcgttttgcgctgcttcgcgatgtacgggccagatatacgcgagggcctatttcccatgattccttcatatttgcatatacgatacaaggctgttagagagataattagaattaatttgactgtaaacacaaagatattagtacaaaatacgtgacgtagaaagtaataatttcttgggtagtttgcagttttaaaattatgttttaaaatggactatcatatgcttaccgtaacttgaaagtatttcgatttcttggctttatatatcttgtggaaaggacgaaacaccgtaatacgactcactatagggtctagaattcgtgttccccgcacctgcggggatgaaccgtaagttgtgttcttctttgcctaggccttcaggtgttccccgcacctgcggggatgaaccggcggccgctttttttcttctgaggcggaaagaaccagctggggctctagggggtatccccacgcgccctgtagcggcgcattaagcgcggcgggtgtggtggttacgcgcagcgtgaccgctacacttgccagcgccctagcgcccgctcctttcgctttcttcccttcctttctcgccacgttcgccggctttccccgtcaagctctaaatcggggcatccctttagggttccgatttagtgctttacggcacctcgaccccaaaaaacttgattagggtgatggttcacgtagtgggccatcgccctgatagacggtttttcgccctttgacgttggagtccacgttctttaatagtggactcttgttccaaactggaacaacactcaaccctatctcggtctattcttttgatttataagggattttggggatttcggcctattggttaaaaaatgagctgatttaacaaaaatttaacgcgaattaattctgtggaatgtgtgtcagttagggtgtggaaagtccccaggctccccaggcaggcagaagtatgcaaagcatgcatctcaattagtcagcaaccaggtgtggaaagtccccaggctccccagcaggcagaagtatgcaaagcatgcatctcaattagtcagcaaccatagtcccgcccctaactccgcccatcccgcccctaactccgcccagttccgcccattctccgccccatggctgactaattttttttatttatgcagaggccgaggccgcctctgcctctgagctattccagaagtagtgaggaggcttttttggaggcctaggcttttgcaaaaagctcccgggagcttgtatatccattttcggatctgatcaagagacaggatgaggatcgtttcgcatgattgaacaagatggattgcacgcaggttctccggccgcttgggtggagaggctattcggctatgactgggcacaacagacaatcggctgctctgatgccgccgtgttccggctgtcagcgcaggggcgcccggttctttttgtcaagaccgacctgtccggtgccctgaatgaactgcaggacgaggcagcgcggctatcgtggctggccacgacgggcgttccttgcgcagctgtgctcgacgttgtcactgaagcgggaagggactggctgctattgggcgaagtgccggggcaggatctcctgtcatctcaccttgctcctgccgagaaagtatccatcatggctgatgcaatgcggcggctgcatacgcttgatccggctacctgcccattcgaccaccaagcgaaacatcgcatcgagcgagcacgtactcggatggaagccggtcttgtcgatcaggatgatctggacgaagagcatcaggggctcgcgccagccgaactgttcgccaggctcaaggcgcgcatgcccgacggcgaggatctcgtcgtgacccatggcgatgcctgcttgccgaatatcatggtggaaaatggccgcttttctggattcatcgactgtggccggctgggtgtggcggaccgctatcaggacatagcgttggctacccgtgatattgctgaagagcttggcggcgaatgggctgaccgcttcctcgtgctttacggtatcgccgctcccgattcgcagcgcatcgccttctatcgccttcttgacgagttcttctgagcgggactctggggttcgaaatgaccgaccaagcgacgcccaacctgccatcacgagatttcgattccaccgccgccttctatgaaaggttgggcttcggaatcgttttccgggacgccggctggatgatcctccagcgcggggatctcatgctggagttcttcgcccaccccaacttgtttattgcagcttataatggttacaaataaagcaatagcatcacaaatttcacaaataaagcatttttttcactgcattctagttgtggtttgtccaaactcatcaatgtatcttatcatgtctgtataccgtcgacctctagctagagcttggcgtaatcatggtcatagctgtttcctgtgtgaaattgttatccgctcacaattccacacaacatacgagccggaagcataaagtgtaaagcctggggtgcctaatgagtgagctaactcacattaattgcgttgcgctcactgcccgctttccagtcgggaaacctgtcgtgccagctgcattaatgaatcggccaacgcgcggggagaggcggtttgcgtattgggcgctcttccgcttcctcgctcactgactcgctgcgctcggtcgttcggctgcggcgagcggtatcagctcactcaaaggcggtaatacggttatccacagaatcaggggataacgcaggaaagaacatgtgagcaaaaggccagcaaaaggccaggaaccgtaaaaaggccgcgttgctggcgtttttccataggctccgcccccctgacgagcatcacaaaaatcgacgctcaagtcagaggtggcgaaacccgacaggactataaagataccaggcgtttccccctggaagctccctcgtgcgctctcctgttccgaccctgccgcttaccggatacctgtccgcctttctcccttcgggaagcgtggcgctttctcaatgctcacgctgtaggtatctcagttcggtgtaggtcgttcgctccaagctgggctgtgtgcacgaaccccccgttcagcccgaccgctgcgccttatccggtaactatcgtcttgagtccaacccggtaagacacgacttatcgccactggcagcagccactggtaacaggattagcagagcgaggtatgtaggcggtgctacagagttcttgaagtggtggcctaactacggctacactagaaggacagtatttggtatctgcgctctgctgaagccagttaccttcggaaaaagagttggtagctcttgatccggcaaacaaaccaccgctggtagcggtggtttttttgtttgcaagcagcagattacgcgcagaaaaaaaggatctcaagaagatcctttgatcttttctacggggtctgacgctcagtggaacgaaaactcacgttaagggattttggtcatgagattatcaaaaaggatcttcacctagatccttttaaattaaaaatgaagttttaaatcaatctaaagtatatatgagtaaacttggtctgacagttaccaatgcttaatcagtgaggcacctatctcagcgatctgtctatttcgttcatccatagttgcctgactccccgtcgtgtagataactacgatacgggagggcttaccatctggccccagtgctgcaatgataccgcgagacccacgctcaccggctccagatttatcagcaataaaccagccagccggaagggccgagcgcagaagtggtcctgcaactttatccgcctccatccagtctattaattgttgccgggaagctagagtaagtagttcgccagttaatagtttgcgcaacgttgttgccattgctacaggcatcgtggtgtcacgctcgtcgtttggtatggcttcattcagctccggttcccaacgatcaaggcgagttacatgatcccccatgttgtgcaaaaaagcggttagctccttcggtcctccgatcgttgtcagaagtaagttggccgcagtgttatcactcatggttatggcagcactgcataattctcttactgtcatgccatccgtaagatgcttttctgtgactggtgagtactcaaccaagtcattctgagaatagtgtatgcggcgaccgagttgctcttgcccggcgtcaatacgggataataccgcgccacatagcagaactttaaaagtgctcatcattggaaaacgttcttcggggcgaaaactctcaaggatcttaccgctgttgagatccagttcgatgtaacccactcgtgcacccaactgatcttcagcatcttttactttcaccagcgtttctgggtgagcaaaaacaggaaggcaaaatgccgcaaaaaagggaataagggcgacacggaaatgttgaatactcatactcttcctttttcattattattgaagcatttatcagggttattgtctcatgagcggatacatatttgaatgtatttagaaaaataaacaaataggggttccgcgcacatttccccgaaaagtgccacctgacgtc

SEQ ID NO: 234 - DNA, 4796 bp, Artificial Sequence
  Synthetic
gacggatcgggagatctcccgatcccctatggtcgactctcagtacaatctgctctgatgccgcatagttaagccagtatctgctccctgcttgtgtgttggaggtcgctgagtagtgcgcgagcaaaatttaagctacaacaaggcaaggcttgaccgacaattgcatgaagaatctgcttagggttaggcgttttgcgctgcttcgcgatgtacgggccagatatacgcgagggcctatttcccatgattccttcatatttgcatatacgatacaaggctgttagagagataattagaattaatttgactgtaaacacaaagatattagtacaaaatacgtgacgtagaaagtaataatttcttgggtagtttgcagttttaaaattatgttttaaaatggactatcatatgcttaccgtaacttgaaagtatttcgatttcttggctttatatatcttgtggaaaggacgaaacaccgtaatacgactcactatagggtctagaattcgtgttccccgcacctgcggggatgaaccgacgaagtggaggaggacacgggcaatgaacttgtgttccccgcacctgcggggatgaaccggcggccgctttttttcttctgaggcggaaagaaccagctggggctctagggggtatccccacgcgccctgtagcggcgcattaagcgcggcgggtgtggtggttacgcgcagcgtgaccgctacacttgccagcgccctagcgcccgctcctttcgctttcttcccttcctttctcgccacgttcgccggctttccccgtcaagctctaaatcggggcatccctttagggttccgatttagtgctttacggcacctcgaccccaaaaaacttgattagggtgatggttcacgtagtgggccatcgccctgatagacggtttttcgccctttgacgttggagtccacgttctttaatagtggactcttgttccaaactggaacaacactcaaccctatctcggtctattcttttgatttataagggattttggggatttcggcctattggttaaaaaatgagctgatttaacaaaaatttaacgcgaattaattctgtggaatgtgtgtcagttagggtgtggaaagtccccaggctccccaggcaggcagaagtatgcaaagcatgcatctcaattagtcagcaaccaggtgtggaaagtccccaggctccccagcaggcagaagtatgcaaagcatgcatctcaattagtcagcaaccatagtcccgcccctaactccgcccatcccgcccctaactccgcccagttccgcccattctccgccccatggctgactaattttttttatttatgcagaggccgaggccgcctctgcctctgagctattccagaagtagtgaggaggcttttttggaggcctaggcttttgcaaaaagctcccgggagcttgtatatccattttcggatctgatcaagagacaggatgaggatcgtttcgcatgattgaacaagatggattgcacgcaggttctccggccgcttgggtggagaggctattcggctatgactgggcacaacagacaatcggctgctctgatgccgccgtgttccggctgtcagcgcaggggcgcccggttctttttgtcaagaccgacctgtccggtgccctgaatgaactgcaggacgaggcagcgcggctatcgtggctggccacgacgggcgttccttgcgcagctgtgctcgacgttgtcactgaagcgggaagggactggctgctattgggcgaagtgccggggcaggatctcctgtcatctcaccttgctcctgccgagaaagtatccatcatggctgatgcaatgcggcggctgcatacgcttgatccggctacctgcccattcgaccaccaagcgaaacatcgcatcgagcgagcacgtactcggatggaagccggtcttgtcgatcaggatgatctggacgaagagcatcaggggctcgcgccagccgaactgttcgccaggctcaaggcgcgcatgcccgacggcgaggatctcgtcgtgacccatggcgatgcctgcttgccgaatatcatggtggaaaatggccgcttttctggattcatcgactgtggccggctgggtgtggcggaccgctatcaggacatagcgttggctacccgtgatattgctgaagagcttggcggcgaatgggctgaccgcttcctcgtgctttacggtatcgccgctcccgattcgcagcgcatcgccttctatcgccttcttgacgagttcttctgagcgggactctggggttcgaaatgaccgaccaagcgacgcccaacctgccatcacgagatttcgattccaccgccgccttctatgaaaggttgggcttcggaatcgttttccgggacgccggctggatgatcctccagcgcggggatctcatgctggagttcttcgcccaccccaacttgtttattgcagcttataatggttacaaataaagcaatagcatcacaaatttcacaaataaagcatttttttcactgcattctagttgtggtttgtccaaactcatcaatgtatcttatcatgtctgtataccgtcgacctctagctagagcttggcgtaatcatggtcatagctgtttcctgtgtgaaattgttatccgctcacaattccacacaacatacgagccggaagcataaagtgtaaagcctggggtgcctaatgagtgagctaactcacattaattgcgttgcgctcactgcccgctttccagtcgggaaacctgtcgtgccagctgcattaatgaatcggccaacgcgcggggagaggcggtttgcgtattgggcgctcttccgcttcctcgctcactgactcgctgcgctcggtcgttcggctgcggcgagcggtatcagctcactcaaaggcggtaatacggttatccacagaatcaggggataacgcaggaaagaacatgtgagcaaaaggccagcaaaaggccaggaaccgtaaaaaggccgcgttgctggcgtttttccataggctccgcccccctgacgagcatcacaaaaatcgacgctcaagtcagaggtggcgaaacccgacaggactataaagataccaggcgtttccccctggaagctccctcgtgcgctctcctgttccgaccctgccgcttaccggatacctgtccgcctttctcccttcgggaagcgtggcgctttctcaatgctcacgctgtaggtatctcagttcggtgtaggtcgttcgctccaagctgggctgtgtgcacgaaccccccgttcagcccgaccgctgcgccttatccggtaactatcgtcttgagtccaacccggtaagacacgacttatcgccactggcagcagccactggtaacaggattagcagagcgaggtatgtaggcggtgctacagagttcttgaagtggtggcctaactacggctacactagaaggacagtatttggtatctgcgctctgctgaagccagttaccttcggaaaaagagttggtagctcttgatccggcaaacaaaccaccgctggtagcggtggtttttttgtttgcaagcagcagattacgcgcagaaaaaaaggatctcaagaagatcctttgatcttttctacggggtctgacgctcagtggaacgaaaactcacgttaagggattttggtcatgagattatcaaaaaggatcttcacctagatccttttaaattaaaaatgaagttttaaatcaatctaaagtatatatgagtaaacttggtctgacagttaccaatgcttaatcagtgaggcacctatctcagcgatctgtctatttcgttcatccatagttgcctgactccccgtcgtgtagataactacgatacgggagggcttaccatctggccccagtgctgcaatgataccgcgagacccacgctcaccggctccagatttatcagcaataaaccagccagccggaagggccgagcgcagaagtggtcctgcaactttatccgcctccatccagtctattaattgttgccgggaagctagagtaagtagttcgccagttaatagtttgcgcaacgttgttgccattgctacaggcatcgtggtgtcacgctcgtcgtttggtatggcttcattcagctccggttcccaacgatcaaggcgagttacatgatcccccatgttgtgcaaaaaagcggttagctccttcggtcctccgatcgttgtcagaagtaagttggccgcagtgttatcactcatggttatggcagcactgcataattctcttactgtcatgccatccgtaagatgcttttctgtgactggtgagtactcaaccaagtcattctgagaatagtgtatgcggcgaccgagttgctcttgcccggcgtcaatacgggataataccgcgccacatagcagaactttaaaagtgctcatcattggaaaacgttcttcggggcgaaaactctcaaggatcttaccgctgttgagatccagttcgatgtaacccactcgtgcacccaactgatcttcagcatcttttactttcaccagcgtttctgggtgagcaaaaacaggaaggcaaaatgccgcaaaaaagggaataagggcgacacggaaatgttgaatactcatactcttcctttttcattattattgaagcatttatcagggttattgtctcatgagcggatacatatttgaatgtatttagaaaaataaacaaataggggttccgcgcacatttccccgaaaagtgccacctgacgtc

SEQ ID NO: 235 - DNA, 5922 bp, Artificial Sequence
  Synthetic
cttcggaaaaagagttggtagctcttgatccggcaaacaaaccaccgctggtagcggtggtttttttgtttgcaagcagcagattacgcgcagaaaaaaaggatctcaagaagatcctttgatcttttctacggggtctgacgctcagtggaacgaaaactcacgttaagggattttggtcatgagattatcaaaaaggatcttcacctagatccttttaaattaaaaatgaagttttaaatcaatctaaagtatatatgagtaaacttggtctgacagttaccaatgcttaatcagtgaggcacctatctcagcgatctgtctatttcgttcatccatagttgcctgactccccgtcgtgtagataactacgatacgggagggcttaccatctggccccagtgctgcaatgataccgcgagacccacgctcaccggctccagatttatcagcaataaaccagccagccggaagggccgagcgcagaagtggtcctgcaactttatccgcctccatccagtctattaattgttgccgggaagctagagtaagtagttcgccagttaatagtttgcgcaacgttgttgccattgctacaggcatcgtggtgtcacgctcgtcgtttggtatggcttcattcagctccggttcccaacgatcaaggcgagttacatgatcccccatgttgtgcaaaaaagcggttagctccttcggtcctccgatcgttgtcagaagtaagttggccgcagtgttatcactcatggttatggcagcactgcataattctcttactgtcatgccatccgtaagatgcttttctgtgactggtgagtactcaaccaagtcattctgagaatagtgtatgcggcgaccgagttgctcttgcccggcgtcaatacgggataataccgcgccacatagcagaactttaaaagtgctcatcattggaaaacgttcttcggggcgaaaactctcaaggatcttaccgctgttgagatccagttcgatgtaacccactcgtgcacccaactgatcttcagcatcttttactttcaccagcgtttctgggtgagcaaaaacaggaaggcaaaatgccgcaaaaaagggaataagggcgacacggaaatgttgaatactcatactcttcctttttcaatattattgaagcatttatcagggttattgtctcatgagcggatacatatttgaatgtatttagaaaaataaacaaataggggttccgcgcacatttccccgaaaagtgccacctgacgtcgacggatcgggagatctcccgatcccctatggtgcactctcagtacaatctgctctgatgccgcatagttaagccagtatctgctccctgcttgtgtgttggaggtcgctgagtagtgcgcgagcaaaatttaagctacaacaaggcaaggcttgaccgacaattgcatgaagaatctgcttagggttaggcgttttgcgctgcttcgcgatgtacgggccagatatacgcgttgacattgattattgactagttattaatagtaatcaattacggggtcattagttcatagcccatatatggagttccgcgttacataacttacggtaaatggcccgcctggctgaccgcccaacgacccccgcccattgacgtcaataatgacgtatgttcccatagtaacgccaatagggactttccattgacgtcaatgggtggagtatttacggtaaactgcccacttggcagtacatcaagtgtatcatatgccaagtacgccccctattgacgtcaatgacggtaaatggcccgcctggcattatgcccagtacatgaccttatgggactttcctacttggcagtacatctacgtattagtcatcgctattaccatggtgatgcggttttggcagtacatcaatgggcgtggatagcggtttgactcacggggatttccaagtctccaccccattgacgtcaatgggagtttgttttggcaccaaaatcaacgggactttccaaaatgtcgtaacaactccgccccattgacgcaaatgggcggtaggcgtgtacggtgggaggtctatataagcagagctctctggctaactagagaacccactgcttactggcttatcgaaattaatacgactcactatagggagacccaagctggctagcgtgttccccgcacctgcggggatgaaccgggatccatggtgagcaagggcgaggagctgttcaccggggtggtgcccatcctggtcgagctggacggcgacgtaaacggccacaagttcagcgtgtccggcgagggcgagggcgatgccacctacggcaagctgaccctgaagttcatctgcaccaccggcaagctgcccgtgccctggcccaccctcgtgaccaccctgacctacggcgtgcagtgcttcagccgctaccccgaccacatgaagcagcacgacttcttcaagtccgccatgcccgaaggctacgtccaggagcgcaccatcttcttcaaggacgacggcaactacaagacccgcgccgaggtgaagttcgagggcgacaccctggtgaaccgcatcgagctgaagggcatcgacttcaaggaggacggcaacatcctggggcacaagctggagtacaactacaacagccacaacgtctatatcatggccgacaagcagaagaacggcatcaaggtgaacttcaagatccgccacaacatcgaggacggcagcgtgcagctcgccgaccactaccagcagaacacccccatcggcgacggccccgtgctgctgcccgacaaccactacctgagcacccagtccgccctgagcaaagaccccaacgagaagcgcgatcacatggtcctgctggagttcgtgaccgccgccgggatcactctcggcatggacgagctgtacaagaagcttagccatggcttcccgccggaggtggaggagcaggatgatggcacgctgcccatgtcttgtgcccaggagagcgggatggaccgtcaccctgcagcctgtgcttctgctaggatcaatgtgaagcgacctgccgccacaaagaaggctggacaggctaagaagaagaaatgagcggccgctcgagtctagagggcccgtttaaacccgctgatcagcctcgactgtgccttctagttgccagccatctgttgtttgcccctcccccgtgccttccttgaccctggaaggtgccactcccactgtcctttcctaataaaatgaggaaattgcatcgcattgtctgagtaggtgtcattctattctggggggtggggtggggcaggacagcaagggggaggattgggaagacaatagcaggcatgctggggatgcggtgggctctatggcttctgaggcggaaagaaccagctggggctctagggggtatccccacgcgccctgtagcggcgcattaagcgcggcgggtgtggtggttacgcgcagcgtgaccgctacacttgccagcgccctagcgcccgctcctttcgctttcttcccttcctttctcgccacgttcgccggctttccccgtcaagctctaaatcgggggctccctttagggttccgatttagtgctttacggcacctcgaccccaaaaaacttgattagggtgatggttcacgtacctagaagttcctattccgaagttcctattctctagaaagtataggaacttccttggccaaaaagcctgaactcaccgcgacgtctgtcgagaagtttctgatcgaaaagttcgacagcgtctccgacctgatgcagctctcggagggcgaagaatctcgtgctttcagcttcgatgtaggagggcgtggatatgtcctgcgggtaaatagctgcgccgatggtttctacaaagatcgttatgtttatcggcactttgcatcggccgcgctcccgattccggaagtgcttgacattggggaattcagcgagagcctgacctattgcatctcccgccgtgcacagggtgtcacgttgcaagacctgcctgaaaccgaactgcccgctgttctgcagccggtcgcggaggccatggatgcgatcgctgcggccgatcttagccagacgagcgggttcggcccattcggaccgcaaggaatcggtcaatacactacatggcgtgatttcatatgcgcgattgctgatccccatgtgtatcactggcaaactgtgatggacgacaccgtcagtgcgtccgtcgcgcaggctctcgatgagctgatgctttgggccgaggactgccccgaagtccggcacctcgtgcacgcggatttcggctccaacaatgtcctgacggacaatggccgcataacagcggtcattgactggagcgaggcgatgttcggggattcccaatacgaggtcgccaacatcttcttctggaggccgtggttggcttgtatggagcagcagacgcgctacttcgagcggaggcatccggagcttgcaggatcgccgcggctccgggcgtatatgctccgcattggtcttgaccaactctatcagagcttggttgacggcaatttcgatgatgcagcttgggcgcagggtcgatgcgacgcaatcgtccgatccggagccgggactgtcgggcgtacacaaatcgcccgcagaagcgcggccgtctggaccgatggctgtgtagaagtactcgccgatagtggaaaccgacgccccagcactcgtccgagggcaaaggaatagcacgtactacgagatttcgattccaccgccgccttctatgaaaggttgggcttcggaatcgttttccgggacgccggctggatgatcctccagcgcggggatctcatgctggagttcttcgcccaccccaacttgtttattgcagcttataatggttacaaataaagcaatagcatcacaaatttcacaaataaagcatttttttcactgcattctagttgtggtttgtccaaactcatcaatgtatcttatcatgtctgtataccgtcgacctctagctagagcttggcgtaatcatggtcatagctgtttcctgtgtgaaattgttatccgctcacaattccacacaacatacgagccggaagcataaagtgtaaagcctggggtgcctaatgagtgagctaactcacattaattgcgttgcgctcactgcccgctttccagtcgggaaacctgtcgtgccagctgcattaatgaatcggccaacgcgcggggagaggcggtttgcgtattgggcgctcttccgcttcctcgctcactgactcgctgcgctcggtcgttcggctgcggcgagcggtatcagctcactcaaaggcggtaatacggttatccacagaatcaggggataacgcaggaaagaacatgtgagcaaaaggccagcaaaaggccaggaaccgtaaaaaggccgcgttgctggcgtttttccataggctccgcccccctgacgagcatcacaaaaatcgacgctcaagtcagaggtggcgaaacccgacaggactataaagataccaggcgtttccccctggaagctccctcgtgcgctctcctgttccgaccctgccgcttaccggatacctgtccgcctttctcccttcgggaagcgtggcgctttctcatagctcacgctgtaggtatctcagttcggtgtaggtcgttcgctccaagctgggctgtgtgcacgaaccccccgttcagcccgaccgctgcgccttatccggtaactatcgtcttgagtccaacccggtaagacacgacttatcgccactggcagcagccactggtaacaggattagcagagcgaggtatgtaggcggtgctacagagttcttgaagtggtggcctaactacggctacactagaaggacagtatttggtatctgcgctctgctgaagccagttac

SEQ ID NO: 236 - DNA, 5921 bp, Artificial Sequence
  Synthetic
cttcggaaaaagagttggtagctcttgatccggcaaacaaaccaccgctggtagcggtggtttttttgtttgcaagcagcagattacgcgcagaaaaaaaggatctcaagaagatcctttgatcttttctacggggtctgacgctcagtggaacgaaaactcacgttaagggattttggtcatgagattatcaaaaaggatcttcacctagatccttttaaattaaaaatgaagttttaaatcaatctaaagtatatatgagtaaacttggtctgacagttaccaatgcttaatcagtgaggcacctatctcagcgatctgtctatttcgttcatccatagttgcctgactccccgtcgtgtagataactacgatacgggagggcttaccatctggccccagtgctgcaatgataccgcgagacccacgctcaccggctccagatttatcagcaataaaccagccagccggaagggccgagcgcagaagtggtcctgcaactttatccgcctccatccagtctattaattgttgccgggaagctagagtaagtagttcgccagttaatagtttgcgcaacgttgttgccattgctacaggcatcgtggtgtcacgctcgtcgtttggtatggcttcattcagctccggttcccaacgatcaaggcgagttacatgatcccccatgttgtgcaaaaaagcggttagctccttcggtcctccgatcgttgtcagaagtaagttggccgcagtgttatcactcatggttatggcagcactgcataattctcttactgtcatgccatccgtaagatgcttttctgtgactggtgagtactcaaccaagtcattctgagaatagtgtatgcggcgaccgagttgctcttgcccggcgtcaatacgggataataccgcgccacatagcagaactttaaaagtgctcatcattggaaaacgttcttcggggcgaaaactctcaaggatcttaccgctgttgagatccagttcgatgtaacccactcgtgcacccaactgatcttcagcatcttttactttcaccagcgtttctgggtgagcaaaaacaggaaggcaaaatgccgcaaaaaagggaataagggcgacacggaaatgttgaatactcatactcttcctttttcaatattattgaagcatttatcagggttattgtctcatgagcggatacatatttgaatgtatttagaaaaataaacaaataggggttccgcgcacatttccccgaaaagtgccacctgacgtcgacggatcgggagatctcccgatcccctatggtgcactctcagtacaatctgctctgatgccgcatagttaagccagtatctgctccctgcttgtgtgttggaggtcgctgagtagtgcgcgagcaaaatttaagctacaacaaggcaaggcttgaccgacaattgcatgaagaatctgcttagggttaggcgttttgcgctgcttcgcgatgtacgggccagatatacgcgttgacattgattattgactagttattaatagtaatcaattacggggtcattagttcatagcccatatatggagttccgcgttacataacttacggtaaatggcccgcctggctgaccgcccaacgacccccgcccattgacgtcaataatgacgtatgttcccatagtaacgccaatagggactttccattgacgtcaatgggtggagtatttacggtaaactgcccacttggcagtacatcaagtgtatcatatgccaagtacgccccctattgacgtcaatgacggtaaatggcccgcctggcattatgcccagtacatgaccttatgggactttcctacttggcagtacatctacgtattagtcatcgctattaccatggtgatgcggttttggcagtacatcaatgggcgtggatagcggtttgactcacggggatttccaagtctccaccccattgacgtcaatgggagtttgttttggcaccaaaatcaacgggactttccaaaatgtcgtaacaactccgccccattgacgcaaatgggcggtaggcgtgtacggtgggaggtctatataagcagagctctctggctaactagagaacccactgcttactggcttatcgaaattaatacgactcactatagggagacccaagctggctagcgtgaactgccgagtaggtagctgataacggatccatggtgagcaagggcgaggagctgttcaccggggtggtgcccatcctggtcgagctggacggcgacgtaaacggccacaagttcagcgtgtccggcgagggcgagggcgatgccacctacggcaagctgaccctgaagttcatctgcaccaccggcaagctgcccgtgccctggcccaccctcgtgaccaccctgacctacggcgtgcagtgcttcagccgctaccccgaccacatgaagcagcacgacttcttcaagtccgccatgcccgaaggctacgtccaggagcgcaccatcttcttcaaggacgacggcaactacaagacccgcgccgaggtgaagttcgagggcgacaccctggtgaaccgcatcgagctgaagggcatcgacttcaaggaggacggcaacatcctggggcacaagctggagtacaactacaacagccacaacgtctatatcatggccgacaagcagaagaacggcatcaaggtgaacttcaagatccgccacaacatcgaggacggcagcgtgcagctcgccgaccactaccagcagaacacccccatcggcgacggccccgtgctgctgcccgacaaccactacctgagcacccagtccgccctgagcaaagaccccaacgagaagcgcgatcacatggtcctgctggagttcgtgaccgccgccgggatcactctcggcatggacgagctgtacaagaagcttagccatggcttcccgccggaggtggaggagcaggatgatggcacgctgcccatgtcttgtgcccaggagagcgggatggaccgtcaccctgcagcctgtgcttctgctaggatcaatgtgaagcgacctgccgccacaaagaaggctggacaggctaagaagaagaaatgagcggccgctcgagtctagagggcccgtttaaacccgctgatcagcctcgactgtgccttctagttgccagccatctgttgtttgcccctcccccgtgccttccttgaccctggaaggtgccactcccactgtcctttcctaataaaatgaggaaattgcatcgcattgtctgagtaggtgtcattctattctggggggtggggtggggcaggacagcaagggggaggattgggaagacaatagcaggcatgctggggatgcggtgggctctatggcttctgaggcggaaagaaccagctggggctctagggggtatccccacgcgccctgtagcggcgcattaagcgcggcgggtgtggtggttacgcgcagcgtgaccgctacacttgccagcgccctagcgcccgctcctttcgctttcttcccttcctttctcgccacgttcgccggctttccccgtcaagctctaaatcgggggctccctttagggttccgatttagtgctttacggcacctcgaccccaaaaaacttgattagggtgatggttcacgtacctagaagttcctattccgaagttcctattctctagaaagtataggaacttccttggccaaaaagcctgaactcaccgcgacgtctgtcgagaagtttctgatcgaaaagttcgacagcgtctccgacctgatgcagctctcggagggcgaagaatctcgtgctttcagcttcgatgtaggagggcgtggatatgtcctgcgggtaaatagctgcgccgatggtttctacaaagatcgttatgtttatcggcactttgcatcggccgcgctcccgattccggaagtgcttgacattggggaattcagcgagagcctgacctattgcatctcccgccgtgcacagggtgtcacgttgcaagacctgcctgaaaccgaactgcccgctgttctgcagccggtcgcggaggccatggatgcgatcgctgcggccgatcttagccagacgagcgggttcggcccattcggaccgcaaggaatcggtcaatacactacatggcgtgatttcatatgcgcgattgctgatccccatgtgtatcactggcaaactgtgatggacgacaccgtcagtgcgtccgtcgcgcaggctctcgatgagctgatgctttgggccgaggactgccccgaagtccggcacctcgtgcacgcggatttcggctccaacaatgtcctgacggacaatggccgcataacagcggtcattgactggagcgaggcgatgttcggggattcccaatacgaggtcgccaacatcttcttctggaggccgtggttggcttgtatggagcagcagacgcgctacttcgagcggaggcatccggagcttgcaggatcgccgcggctccgggcgtatatgctccgcattggtcttgaccaactctatcagagcttggttgacggcaatttcgatgatgcagcttgggcgcagggtcgatgcgacgcaatcgtccgatccggagccgggactgtcgggcgtacacaaatcgcccgcagaagcgcggccgtctggaccgatggctgtgtagaagtactcgccgatagtggaaaccgacgccccagcactcgtccgagggcaaaggaatagcacgtactacgagatttcgattccaccgccgccttctatgaaaggttgggcttcggaatcgttttccgggacgccggctggatgatcctccagcgcggggatctcatgctggagttcttcgcccaccccaacttgtttattgcagcttataatggttacaaataaagcaatagcatcacaaatttcacaaataaagcatttttttcactgcattctagttgtggtttgtccaaactcatcaatgtatcttatcatgtctgtataccgtcgacctctagctagagcttggcgtaatcatggtcatagctgtttcctgtgtgaaattgttatccgctcacaattccacacaacatacgagccggaagcataaagtgtaaagcctggggtgcctaatgagtgagctaactcacattaattgcgttgcgctcactgcccgctttccagtcgggaaacctgtcgtgccagctgcattaatgaatcggccaacgcgcggggagaggcggtttgcgtattgggcgctcttccgcttcctcgctcactgactcgctgcgctcggtcgttcggctgcggcgagcggtatcagctcactcaaaggcggtaatacggttatccacagaatcaggggataacgcaggaaagaacatgtgagcaaaaggccagcaaaaggccaggaaccgtaaaaaggccgcgttgctggcgtttttccataggctccgcccccctgacgagcatcacaaaaatcgacgctcaagtcagaggtggcgaaacccgacaggactataaagataccaggcgtttccccctggaagctccctcgtgcgctctcctgttccgaccctgccgcttaccggatacctgtccgcctttctcccttcgggaagcgtggcgctttctcatagctcacgctgtaggtatctcagttcggtgtaggtcgttcgctccaagctgggctgtgtgcacgaaccccccgttcagcccgaccgctgcgccttatccggtaactatcgtcttgagtccaacccggtaagacacgacttatcgccactggcagcagccactggtaacaggattagcagagcgaggtatgtaggcggtgctacagagttcttgaagtggtggcctaactacggctacactagaaggacagtatttggtatctgcgctctgctgaagccagttac

SEQ ID NO: 237 - DNA, 6108 bp, Artificial Sequence
  Synthetic
gacggatcgggagatctcccgatcccctatggtcgactctcagtacaatctgctctgatgccgcatagttaagccagtatctgctccctgcttgtgtgttggaggtcgctgagtagtgcgcgagcaaaatttaagctacaacaaggcaaggcttgaccgacaattgcatgaagaatctgcttagggttaggcgttttgcgctgcttcgcgatgtacgggccagatatacgcgttgacattgattattgactagttattaatagtaatcaattacggggtcattagttcatagcccatatatggagttccgcgttacataacttacggtaaatggcccgcctggctgaccgcccaacgacccccgcccattgacgtcaataatgacgtatgttcccatagtaacgccaatagggactttccattgacgtcaatgggtggactatttacggtaaactgcccacttggcagtacatcaagtgtatcatatgccaagtacgccccctattgacgtcaatgacggtaaatggcccgcctggcattatgcccagtacatgaccttatgggactttcctacttggcagtacatctacgtattagtcatcgctattaccatggtgatgcggttttggcagtacatcaatgggcgtggatagcggtttgactcacggggatttccaagtctccaccccattgacgtcaatgggagtttgttttggcaccaaaatcaacgggactttccaaaatgtcgtaacaactccgccccattgacgcaaatgggcggtaggcgtgtacggtgggaggtctatataagcagagctctctggctaactagagaacccactgcttactggcttatcgaaattaatacgactcactatagggagacccaagcttggtaccgagctcggccaccatgggccctaaaaaaaagcggaaggtaggtaccggcatgagccactatttttccctggtgaggctgatcggctctcccaggcacgacgcatggctgcgggatctgagcagacacggcgaggcctaccgggaccacgcactgatctggagactgttcccaggcgacggagccgcaagggatttcgtgtttcgccggctggaggatgagaagtctttttatgtggtgagcgccagacctccacaggcagacgcaggcctgttccacatccagtctaaggcctacagccctgagctggccgagggcgactgggtgaggttcgatctgcgcgccaacccaacagtgagcgtgagaagggagaatggcagatcccagaggcacgatgtgctgatgcacgccaagcagctggcctccaccgagaagtctgccctgcccgagcggctggaggcagcaggaagagagtggctgaaggacagggcagagcggtggggcctggacctgagaaccgattccctgatgcagaacggctacagacagcagaggctgaagcgcaagggcaagcacatcgccttttctacactggactatcagggcatcgcccaagtgaccgatcctgagcagctgcgccgggccctgctggacggagtgggacactccaagggattcggatgcggcctgctgctggtgaagagggtggattgacctacttccaatccaatattggaagtggataatctagagggccctattctatagtgtcacctaaatgctagagctcgctgatcagcctcgactgtgccttctagttgccagccatctgttgtttgcccctcccccgtgccttccttgaccctggaaggtgccactcccactgtcctttcctaataaaatgaggaaattgcatcgcattgtctgagtaggtgtcattctattctggggggtggggtggggcaggacagcaagggggaggattgggaagacaatagcaggcatgctggggatgcggtgggctctatggcttctgaggcggaaagaaccagctggggctctagggggtatccccacgcgccctgtagcggcgcattaagcgcggcgggtgtggtggttacgcgcagcgtgaccgctacacttgccagcgccctagcgcccgctcctttcgctttcttcccttcctttctcgccacgttcgccggctttccccgtcaagctctaaatcggggcatccctttagggttccgatttagtgctttacggcacctcgaccccaaaaaacttgattagggtgatggttcacgtagtgggccatcgccctgatagacggtttttcgccctttgacgttggagtccacgttctttaatagtggactcttgttccaaactggaacaacactcaaccctatctcggtctattcttttgatttataagggattttggggatttcggcctattggttaaaaaatgagctgatttaacaaaaatttaacgcgaattaattctgtggaatgtgtgtcagttagggtgtggaaagtccccaggctccccaggcaggcagaagtatgcaaagcatgcatctcaattagtcagcaaccaggtgtggaaagtccccaggctccccagcaggcagaagtatgcaaagcatgcatctcaattagtcagcaaccatagtcccgcccctaactccgcccatcccgcccctaactccgcccagttccgcccattctccgccccatggctgactaattttttttatttatgcagaggccgaggccgcctctgcctctgagctattccagaagtagtgaggaggcttttttggaggcctaggcttttgcaaaaagctcccgggagcttgtatatccattttcggatctgatcaagagacaggatgaggatcgtttcgcatgattgaacaagatggattgcacgcaggttctccggccgcttgggtggagaggctattcggctatgactgggcacaacagacaatcggctgctctgatgccgccgtgttccggctgtcagcgcaggggcgcccggttctttttgtcaagaccgacctgtccggtgccctgaatgaactgcaggacgaggcagcgcggctatcgtggctggccacgacgggcgttccttgcgcagctgtgctcgacgttgtcactgaagcgggaagggactggctgctattgggcgaagtgccggggcaggatctcctgtcatctcaccttgctcctgccgagaaagtatccatcatggctgatgcaatgcggcggctgcatacgcttgatccggctacctgcccattcgaccaccaagcgaaacatcgcatcgagcgagcacgtactcggatggaagccggtcttgtcgatcaggatgatctggacgaagagcatcaggggctcgcgccagccgaactgttcgccaggctcaaggcgcgcatgcccgacggcgaggatctcgtcgtgacccatggcgatgcctgcttgccgaatatcatggtggaaaatggccgcttttctggattcatcgactgtggccggctgggtgtggcggaccgctatcaggacatagcgttggctacccgtgatattgctgaagagcttggcggcgaatgggctgaccgcttcctcgtgctttacggtatcgccgctcccgattcgcagcgcatcgccttctatcgccttcttgacgagttcttctgagcgggactctggggttcgaaatgaccgaccaagcgacgcccaacctgccatcacgagatttcgattccaccgccgccttctatgaaaggttgggcttcggaatcgttttccgggacgccggctggatgatcctccagcgcggggatctcatgctggagttcttcgcccaccccaacttgtttattgcagcttataatggttacaaataaagcaatagcatcacaaatttcacaaataaagcatttttttcactgcattctagttgtggtttgtccaaactcatcaatgtatcttatcatgtctgtataccgtcgacctctagctagagcttggcgtaatcatggtcatagctgtttcctgtgtgaaattgttatccgctcacaattccacacaacatacgagccggaagcataaagtgtaaagcctggggtgcctaatgagtgagctaactcacattaattgcgttgcgctcactgcccgctttccagtcgggaaacctgtcgtgccagctgcattaatgaatcggccaacgcgcggggagaggcggtttgcgtattgggcgctcttccgcttcctcgctcactgactcgctgcgctcggtcgttcggctgcggcgagcggtatcagctcactcaaaggcggtaatacggttatccacagaatcaggggataacgcaggaaagaacatgtgagcaaaaggccagcaaaaggccaggaaccgtaaaaaggccgcgttgctggcgtttttccataggctccgcccccctgacgagcatcacaaaaatcgacgctcaagtcagaggtggcgaaacccgacaggactataaagataccaggcgtttccccctggaagctccctcgtgcgctctcctgttccgaccctgccgcttaccggatacctgtccgcctttctcccttcgggaagcgtggcgctttctcaatgctcacgctgtaggtatctcagttcggtgtaggtcgttcgctccaagctgggctgtgtgcacgaaccccccgttcagcccgaccgctgcgccttatccggtaactatcgtcttgagtccaacccggtaagacacgacttatcgccactggcagcagccactggtaacaggattagcagagcgaggtatgtaggcggtgctacagagttcttgaagtggtggcctaactacggctacactagaaggacagtatttggtatctgcgctctgctgaagccagttaccttcggaaaaagagttggtagctcttgatccggcaaacaaaccaccgctggtagcggtggtttttttgtttgcaagcagcagattacgcgcagaaaaaaaggatctcaagaagatcctttgatcttttctacggggtctgacgctcagtggaacgaaaactcacgttaagggattttggtcatgagattatcaaaaaggatcttcacctagatccttttaaattaaaaatgaagttttaaatcaatctaaagtatatatgagtaaacttggtctgacagttaccaatgcttaatcagtgaggcacctatctcagcgatctgtctatttcgttcatccatagttgcctgactccccgtcgtgtagataactacgatacgggagggcttaccatctggccccagtgctgcaatgataccgcgagacccacgctcaccggctccagatttatcagcaataaaccagccagccggaagggccgagcgcagaagtggtcctgcaactttatccgcctccatccagtctattaattgttgccgggaagctagagtaagtagttcgccagttaatagtttgcgcaacgttgttgccattgctacaggcatcgtggtgtcacgctcgtcgtttggtatggcttcattcagctccggttcccaacgatcaaggcgagttacatgatcccccatgttgtgcaaaaaagcggttagctccttcggtcctccgatcgttgtcagaagtaagttggccgcagtgttatcactcatggttatggcagcactgcataattctcttactgtcatgccatccgtaagatgcttttctgtgactggtgagtactcaaccaagtcattctgagaatagtgtatgcggcgaccgagttgctcttgcccggcgtcaatacgggataataccgcgccacatagcagaactttaaaagtgctcatcattggaaaacgttcttcggggcgaaaactctcaaggatcttaccgctgttgagatccagttcgatgtaacccactcgtgcacccaactgatcttcagcatcttttactttcaccagcgtttctgggtgagcaaaaacaggaaggcaaaatgccgcaaaaaagggaataagggcgacacggaaatgttgaatactcatactcttcctttttcattattattgaagcatttatcagggttattgtctcatgagcggatacatatttgaatgtatttagaaaaataaacaaataggggttccgcgcacatttccccgaaaagtgccacctgacgtc

SEQ ID NO: 238 - DNA, 4792 bp, Artificial Sequence
  Synthetic
ttgcccggcgtcaatacgggataataccgcgccacatagcagaactttaaaagtgctcatcattggaaaacgttcttcggggcgaaaactctcaaggatcttaccgctgttgagatccagttcgatgtaacccactcgtgcacccaactgatcttcagcatcttttactttcaccagcgtttctgggtgagcaaaaacaggaaggcaaaatgccgcaaaaaagggaataagggcgacacggaaatgttgaatactcatactcttcctttttcattattattgaagcatttatcagggttattgtctcatgagcggatacatatttgaatgtatttagaaaaataaacaaataggggttccgcgcacatttccccgaaaagtgccacctgacgtcgacggatcgggagatctcccgatcccctatggtcgactctcagtacaatctgctctgatgccgcatagttaagccagtatctgctccctgcttgtgtgttggaggtcgctgagtagtgcgcgagcaaaatttaagctacaacaaggcaaggcttgaccgacaattgcatgaagaatctgcttagggttaggcgttttgcgctgcttcgcgatgtacgggccagatatacgcgagggcctatttcccatgattccttcatatttgcatatacgatacaaggctgttagagagataattagaattaatttgactgtaaacacaaagatattagtacaaaatacgtgacgtagaaagtaataatttcttgggtagtttgcagttttaaaattatgttttaaaatggactatcatatgcttaccgtaacttgaaagtatttcgatttcttggctttatatatcttgtggaaaggacgaaacaccgtaatacgactcactatagggtctagaattcctgtgaactgccgagtaggtagctgataaccagtcttcgatggtcgaagacgagtgaactgccgagtaggtagctgataacgttgcagcggccgctttttttcttctgaggcggaaagaaccagctggggctctagggggtatccccacgcgccctgtagcggcgcattaagcgcggcgggtgtggtggttacgcgcagcgtgaccgctacacttgccagcgccctagcgcccgctcctttcgctttcttcccttcctttctcgccacgttcgccggctttccccgtcaagctctaaatcgggggctccctttagggttccgatttagtgctttacggcacctcgaccccaaaaaacttgattagggtgatggttcacgtagtgggccatcgccctgatagacggtttttcgccctttgacgttggagtccacgttctttaatagtggactcttgttccaaactggaacaacactcaaccctatctcggtctattcttttgatttataagggattttgccgatttcggcctattggttaaaaaatgagctgatttaacaaaaatttaacgcgaattaattctgtggaatgtgtgtcagttagggtgtggaaagtccccaggctccccagcaggcagaagtatgcaaagcatgcatctcaattagtcagcaaccaggtgtggaaagtccccaggctccccagcaggcagaagtatgcaaagcatgcatctcaattagtcagcaaccatagtcccgcccctaactccgcccatcccgcccctaactccgcccagttccgcccattctccgccccatggctgactaattttttttatttatgcagaggccgaggccgcctctgcctctgagctattccagaagtagtgaggaggcttttttggaggcctaggcttttgcaaaaagctcccgggagcttgtatatccattttcggatctgatcaagagacaggatgaggatcgtttcgcatgattgaacaagatggattgcacgcaggttctccggccgcttgggtggagaggctattcggctatgactgggcacaacagacaatcggctgctctgatgccgccgtgttccggctgtcagcgcaggggcgcccggttctttttgtcaagaccgacctgtccggtgccctgaatgaactgcaggacgaggcagcgcggctatcgtggctggccacgacgggcgttccttgcgcagctgtgctcgacgttgtcactgaagcgggaagggactggctgctattgggcgaagtgccggggcaggatctcctgtcatctcaccttgctcctgccgagaaagtatccatcatggctgatgcaatgcggcggctgcatacgcttgatccggctacctgcccattcgaccaccaagcgaaacatcgcatcgagcgagcacgtactcggatggaagccggtcttgtcgatcaggatgatctggacgaagagcatcaggggctcgcgccagccgaactgttcgccaggctcaaggcgcgcatgcccgacggcgaggatctcgtcgtgacccatggcgatgcctgcttgccgaatatcatggtggaaaatggccgcttttctggattcatcgactgtggccggctgggtgtggcggaccgctatcaggacatagcgttggctacccgtgatattgctgaagagcttggcggcgaatgggctgaccgcttcctcgtgctttacggtatcgccgctcccgattcgcagcgcatcgccttctatcgccttcttgacgagttcttctgagcgggactctggggttcgaaatgaccgaccaagcgacgcccaacctgccatcacgagatttcgattccaccgccgccttctatgaaaggttgggcttcggaatcgttttccgggacgccggctggatgatcctccagcgcggggatctcatgctggagttcttcgcccaccccaacttgtttattgcagcttataatggttacaaataaagcaatagcatcacaaatttcacaaataaagcatttttttcactgcattctagttgtggtttgtccaaactcatcaatgtatcttatcatgtctgtataccgtcgacctctagctagagcttggcgtaatcatggtcatagctgtttcctgtgtgaaattgttatccgctcacaattccacacaacatacgagccggaagcataaagtgtaaagcctggggtgcctaatgagtgagctaactcacattaattgcgttgcgctcactgcccgctttccagtcgggaaacctgtcgtgccagctgcattaatgaatcggccaacgcgcggggagaggcggtttgcgtattgggcgctcttccgcttcctcgctcactgactcgctgcgctcggtcgttcggctgcggcgagcggtatcagctcactcaaaggcggtaatacggttatccacagaatcaggggataacgcaggaaagaacatgtgagcaaaaggccagcaaaaggccaggaaccgtaaaaaggccgcgttgctggcgtttttccataggctccgcccccctgacgagcatcacaaaaatcgacgctcaagtcagaggtggcgaaacccgacaggactataaagataccaggcgtttccccctggaagctccctcgtgcgctctcctgttccgaccctgccgcttaccggatacctgtccgcctttctcccttcgggaagcgtggcgctttctcaatgctcacgctgtaggtatctcagttcggtgtaggtcgttcgctccaagctgggctgtgtgcacgaaccccccgttcagcccgaccgctgcgccttatccggtaactatcgtcttgagtccaacccggtaagacacgacttatcgccactggcagcagccactggtaacaggattagcagagcgaggtatgtaggcggtgctacagagttcttgaagtggtggcctaactacggctacactagaaggacagtatttggtatctgcgctctgctgaagccagttaccttcggaaaaagagttggtagctcttgatccggcaaacaaaccaccgctggtagcggtggtttttttgtttgcaagcagcagattacgcgcagaaaaaaaggatctcaagaagatcctttgatcttttctacggggtctgacgctcagtggaacgaaaactcacgttaagggattttggtcatgagattatcaaaaaggatcttcacctagatccttttaaattaaaaatgaagttttaaatcaatctaaagtatatatgagtaaacttggtctgacagttaccaatgcttaatcagtgaggcacctatctcagcgatctgtctatttcgttcatccatagttgcctgactccccgtcgtgtagataactacgatacgggagggcttaccatctggccccagtgctgcaatgataccgcgagacccacgctcaccggctccagatttatcagcaataaaccagccagccggaagggccgagcgcagaagtggtcctgcaactttatccgcctccatccagtctattaattgttgccgggaagctagagtaagtagttcgccagttaatagtttgcgcaacgttgttgccattgctacaggcatcgtggtgtcacgctcgtcgtttggtatggcttcattcagctccggttcccaacgatcaaggcgagttacatgatcccccatgttgtgcaaaaaagcggttagctccttcggtcctccgatcgttgtcagaagtaagttggccgcagtgttatcactcatggttatggcagcactgcataattctcttactgtcatgccatccgtaagatgcttttctgtgactggtgagtactcaaccaagtcattctgagaatagtgtatgcggcgaccgagttgctc

SEQ ID NO: 239 - DNA, 4789 bp, Artificial Sequence
  Synthetic
ttgcccggcgtcaatacgggataataccgcgccacatagcagaactttaaaagtgctcatcattggaaaacgttcttcggggcgaaaactctcaaggatcttaccgctgttgagatccagttcgatgtaacccactcgtgcacccaactgatcttcagcatcttttactttcaccagcgtttctgggtgagcaaaaacaggaaggcaaaatgccgcaaaaaagggaataagggcgacacggaaatgttgaatactcatactcttcctttttcattattattgaagcatttatcagggttattgtctcatgagcggatacatatttgaatgtatttagaaaaataaacaaataggggttccgcgcacatttccccgaaaagtgccacctgacgtcgacggatcgggagatctcccgatcccctatggtcgactctcagtacaatctgctctgatgccgcatagttaagccagtatctgctccctgcttgtgtgttggaggtcgctgagtagtgcgcgagcaaaatttaagctacaacaaggcaaggcttgaccgacaattgcatgaagaatctgcttagggttaggcgttttgcgctgcttcgcgatgtacgggccagatatacgcgagggcctatttcccatgattccttcatatttgcatatacgatacaaggctgttagagagataattagaattaatttgactgtaaacacaaagatattagtacaaaatacgtgacgtagaaagtaataatttcttgggtagtttgcagttttaaaattatgttttaaaatggactatcatatgcttaccgtaacttgaaagtatttcgatttcttggctttatatatcttgtggaaaggacgaaacaccgtaatacgactcactatagggtctagaattcctgtgacctgccgtataggcagctgaagatcagtcttcgatggtcgaagacgataattctgccgaaaaggcagtgagtagtgtagcggccgctttttttcttctgaggcggaaagaaccagctggggctctagggggtatccccacgcgccctgtagcggcgcattaagcgcggcgggtgtggtggttacgcgcagcgtgaccgctacacttgccagcgccctagcgcccgctcctttcgctttcttcccttcctttctcgccacgttcgccggctttccccgtcaagctctaaatcgggggctccctttagggttccgatttagtgctttacggcacctcgaccccaaaaaacttgattagggtgatggttcacgtagtgggccatcgccctgatagacggtttttcgccctttgacgttggagtccacgttctttaatagtggactcttgttccaaactggaacaacactcaaccctatctcggtctattcttttgatttataagggattttgccgatttcggcctattggttaaaaaatgagctgatttaacaaaaatttaacgcgaattaattctgtggaatgtgtgtcagttagggtgtggaaagtccccaggctccccagcaggcagaagtatgcaaagcatgcatctcaattagtcagcaaccaggtgtggaaagtccccaggctccccagcaggcagaagtatgcaaagcatgcatctcaattagtcagcaaccatagtcccgcccctaactccgcccatcccgcccctaactccgcccagttccgcccattctccgccccatggctgactaattttttttatttatgcagaggccgaggccgcctctgcctctgagctattccagaagtagtgaggaggcttttttggaggcctaggcttttgcaaaaagctcccgggagcttgtatatccattttcggatctgatcaagagacaggatgaggatcgtttcgcatgattgaacaagatggattgcacgcaggttctccggccgcttgggtggagaggctattcggctatgactgggcacaacagacaatcggctgctctgatgccgccgtgttccggctgtcagcgcaggggcgcccggttctttttgtcaagaccgacctgtccggtgccctgaatgaactgcaggacgaggcagcgcggctatcgtggctggccacgacgggcgttccttgcgcagctgtgctcgacgttgtcactgaagcgggaagggactggctgctattgggcgaagtgccggggcaggatctcctgtcatctcaccttgctcctgccgagaaagtatccatcatggctgatgcaatgcggcggctgcatacgcttgatccggctacctgcccattcgaccaccaagcgaaacatcgcatcgagcgagcacgtactcggatggaagccggtcttgtcgatcaggatgatctggacgaagagcatcaggggctcgcgccagccgaactgttcgccaggctcaaggcgcgcatgcccgacggcgaggatctcgtcgtgacccatggcgatgcctgcttgccgaatatcatggtggaaaatggccgcttttctggattcatcgactgtggccggctgggtgtggcggaccgctatcaggacatagcgttggctacccgtgatattgctgaagagcttggcggcgaatgggctgaccgcttcctcgtgctttacggtatcgccgctcccgattcgcagcgcatcgccttctatcgccttcttgacgagttcttctgagcgggactctggggttcgaaatgaccgaccaagcgacgcccaacctgccatcacgagatttcgattccaccgccgccttctatgaaaggttgggcttcggaatcgttttccgggacgccggctggatgatcctccagcgcggggatctcatgctggagttcttcgcccaccccaacttgtttattgcagcttataatggttacaaataaagcaatagcatcacaaatttcacaaataaagcatttttttcactgcattctagttgtggtttgtccaaactcatcaatgtatcttatcatgtctgtataccgtcgacctctagctagagcttggcgtaatcatggtcatagctgtttcctgtgtgaaattgttatccgctcacaattccacacaacatacgagccggaagcataaagtgtaaagcctggggtgcctaatgagtgagctaactcacattaattgcgttgcgctcactgcccgctttccagtcgggaaacctgtcgtgccagctgcattaatgaatcggccaacgcgcggggagaggcggtttgcgtattgggcgctcttccgcttcctcgctcactgactcgctgcgctcggtcgttcggctgcggcgagcggtatcagctcactcaaaggcggtaatacggttatccacagaatcaggggataacgcaggaaagaacatgtgagcaaaaggccagcaaaaggccaggaaccgtaaaaaggccgcgttgctggcgtttttccataggctccgcccccctgacgagcatcacaaaaatcgacgctcaagtcagaggtggcgaaacccgacaggactataaagataccaggcgtttccccctggaagctccctcgtgcgctctcctgttccgaccctgccgcttaccggatacctgtccgcctttctcccttcgggaagcgtggcgctttctcaatgctcacgctgtaggtatctcagttcggtgtaggtcgttcgctccaagctgggctgtgtgcacgaaccccccgttcagcccgaccgctgcgccttatccggtaactatcgtcttgagtccaacccggtaagacacgacttatcgccactggcagcagccactggtaacaggattagcagagcgaggtatgtaggcggtgctacagagttcttgaagtggtggcctaactacggctacactagaaggacagtatttggtatctgcgctctgctgaagccagttaccttcggaaaaagagttggtagctcttgatccggcaaacaaaccaccgctggtagcggtggtttttttgtttgcaagcagcagattacgcgcagaaaaaaaggatctcaagaagatcctttgatcttttctacggggtctgacgctcagtggaacgaaaactcacgttaagggattttggtcatgagattatcaaaaaggatcttcacctagatccttttaaattaaaaatgaagttttaaatcaatctaaagtatatatgagtaaacttggtctgacagttaccaatgcttaatcagtgaggcacctatctcagcgatctgtctatttcgttcatccatagttgcctgactccccgtcgtgtagataactacgatacgggagggcttaccatctggccccagtgctgcaatgataccgcgagacccacgctcaccggctccagatttatcagcaataaaccagccagccggaagggccgagcgcagaagtggtcctgcaactttatccgcctccatccagtctattaattgttgccgggaagctagagtaagtagttcgccagttaatagtttgcgcaacgttgttgccattgctacaggcatcgtggtgtcacgctcgtcgtttggtatggcttcattcagctccggttcccaacgatcaaggcgagttacatgatcccccatgttgtgcaaaaaagcggttagctccttcggtcctccgatcgttgtcagaagtaagttggccgcagtgttatcactcatggttatggcagcactgcataattctcttactgtcatgccatccgtaagatgcttttctgtgactggtgagtactcaaccaagtcattctgagaatagtgtatgcggcgaccgagttgctc

SEQ ID NO: 240 - DNA, 12120 bp, Artificial Sequence
  Synthetic
attcaccaccctgaattgactctcttccgggcgctatcatgccataccgcgaaaggttttgcgccattcgatggtgtccgggatctcgacgctctcccttatgcgactcctgcattaggaaattaatacgactcactataggggaattgtgagcggataacaattcccctgtagaaataattttgtttaactttaataaggagatataccatgggtgaactgccgagtaggtagctgataacagtacagcgcggctgaaatcatcattaaagcggtgaactgccgagtaggtagctgataacgaattcgagcgaggaggttacatatgggacctaagaaaaagcgtaaagttggttccggtatgtttttgcaaagacctaaaccttacagcgatgaaagtttagaaagtttctttatccgagtggctaacaaaaatggctacggtgatgtccatcgcttcctagaagccactaaacgattccttcaagacattgaccataatggctatcaaacctttccgactgatataactcggataaacccatactcagctaaaaacagttccagcgcacgaactgcgtcattcctgaaacttgcacaattgacatttaatgaaccgccagagctacttgggttggcaattaacagaacaaacatgaaatactcgccgtcaactagcgcggttgttagaggtgcagaagtctttcctcgcagtttactacggacgcactccatcccctgctgtcctttgtgtctgcgagaaaatggctacgcctcctacctttggcactttcaggggtacgaatactgccacagccataacgtacctttaattaccacttgtagctgtggtaaggagtttgactaccgagtatctgggttaaagggcatttgctgcaaatgcaaggagcctatcaccttaaccagcagggagaacggtcatgaggcagcgtgtactgtttcaaactggcttgctggccatgaatctaaacctctgccaaatcttcctaaaagctaccgatggggtttagttcattggtggatgggtattaaagatagcgagttcgatcacttttcgttcgttcaatttttctcaaactggccaaggtcattccactcgataatcgaagatgaagtagagttcaaccttgagcatgctgttgtcagcacgtctgaattacgactaaaagatcttcttggtcgattgtttttcggttcaattcggttacctgagcggaatcttcaacacaatatcatccttggtgagcttctctgctatttagaaaatcgtttatggcaagacaagggattaatcgccaacctcaaaatgaacgcgttagaggcgactgtaatgttaaattgtagcctcgatcagattgcatcaatggttgaacaacgcatcttgaagccaaatcgaaaaagcaagcccaacagccctcttgatgttaccgattatctatttcatttcggcgatatcttctgtctttggttagctgagttccaaagcgatgagtttaaccgttcgttttatgtgtcgaggtggtaaatgggtcccaagaaaaagcgcaaggtcggtaccggtatgcaaactctgaaagaactaatcgcatccaatcctgacgacttaacaactgaacttaagagagcatttcgtccactcacaccgcatattgcaattgatggtaatgaacttgacgcactgacgatattagtcaatttaaccgataagactgatgatcagaaagacctgctcgatcgagccaaatgcaagcaaaaacttcgagatgaaaaatggtgggctagctgcataaattgcgttaattacagacaaagccataacccaaaattcccggatatacgttctgaaggcgtgattcgaacccaagccctgggtgaattaccgagtttcctactctcgtcctcaaaaatcccaccataccattggtcatatagccatgattcaaaatacgtcaacaaaagcgcattcctcaccaatgagttttgttgggatggtgagatctcatgtttgggtgagcttcttaaagatgcagatcacccactttggaatactttgaaaaagttaggttgttctcaaaaaacttgcaaagcaatggcaaaacaactagctgatattactctcacgactatcaatgtcacactcgcaccaaattacctgactcaaatatctctccccgatagtgatacatcctacatttcactctctcctgttgcatcgctatcgatgcaaagccactttcatcagaggctccaagatgaaaatcggcatagcgcgataacgcggtttagccgaactaccaacatgggggtcactgcgatgacatgtggcggcgcatttagaatgttaaagtctggcgctaagttttccagcccccctcatcaccgattaaacagtaaacgaagttggttgacgtcagagcatgttcagtcattaaaacagtaccagcgcctcaacaaaagcctcatacctgaaaactctcggattgcactccgtagaaaatacaaaatcgagcttcaaaatatggtcagatcttggtttgcaatgcaagaccatacccttgattcgaacatacttatccaacatttgaatcatgacctatcttacttaggagccacaaaacgttttgcatacgatccagcgatgaccaagctctttactgagcttttgaaacgagagttatcaaattcaatcaataatggtgagcaacacactaatggatcgtttttagtcctaccgaatatcagggtttgtggcgcaacagctttaagctccccggtaacggtggggattccatcacttacagctttctttggcttcgttcacgcatttgaacggaatataaatcgcaccacctcatcgtttcgtgttgaatcctttgcgatatgcgtccatcaactacatgtcgagaagcgaggtttgacagcagagtttgtggaaaaaggcgacgggactatatccgctcccgcgacccgggatgactggcagtgtgatgtcgtatttagccttattttgaacaccaactttgctcaacatattgaccaagatacgttagttacatcactaccaaagcgattggctcggggttcagcaaaaattgcgattgatgactttaaacatatcaactcattctcgacattagaaacagcgatcgaatctctgccaatagaagctggtaggtggttatcactttacgcacagtcaaacaataatctaagtgatctattagcagccatgacagaggaccatcagctcatggcaagctgcgtcggttaccacttgttagaggagcccaaagataaaccaaactccctcagaggttacaaacacgctatcgccgagtgcatcattggactcattaactcaatcacctttagctcagagactgatcccaacacaatcttttggtcgctaaagaactatcaaaactacctagtggtacagccaaggagtatcaacgacgaaactaccgacaaatctagcctatgaagcttgaaggaggtaaataatgggcccgaagaaaaagcgaaaagtaggctcgagtatgaaactaccgacaaatctagcctatgagcgctctatcgacccatcagatgtctgtttttttgtcgtctggcccgatgatagaaaaacacctttaacctacaattctcgtactctgctcgggcaaatggaagcggcatcattagcctatgatgtctcaggtcaaccaataaaaagtgccaccgctgaggcgttagctcaagggaaccctcatcaagttgatttctgccacgttccatacggtgcgagtcatattgaatgcagtttctccgtctcgttttcttctgaactacgtcaaccatataagtgtaactcaagcaaagttaaacaaacgctagtgcaattagtcgaactctacgaaacgaaaatcggctggactgagctagcaacccgatatttgatgaacatttgcaacggtaaatggctgtggaaaaatacccgtaaagcctattgctggaacattgtacttacaccttggccttggaacggggaaaaggttggatttgaagatattcgtactaactacacctcacggcaagactttaaaaataataaaaattggtctgctatagttgaaatgatcaaaaccgcattttctagtactgatgggctggcgatatttgaagtcagggccaccttgcacttgccaacgaatgctatggtgcggccaagccaagttttcacagaaaaagaaagtggcagtaaaagtaaatctaaaactcaaaacagtcgagtttttcagagtacaactattgatggtgaacgatcgccaatactaggggcctttaaaacgggagcagctattgcaaccattgacgactggtatcctgaagccactgagccactaagggtcggacggtttggggttcatcgcgaagatgtcacttgctaccgtcatccgtctaccggaaaagattttttctcgatattacaacaagcagagcactatattgaagtgttgagcgccaacaaaactcccgctcaagaaactatcaacgacatgcactttttaatggctaacctgattaagggtgggatgttccagcataaaggagactgactatggggcctaagaaaaagcggaaggtgggttccggagtgaaatggtattataagacaatcacctttctgccagagttgtgcaacaacgagtcactggctgcaaagtgtctccgcgttctgcatggatttaactatcagtatgagacacgaaatatcggcgtttcatttccgctttggtgtgatgcaacggttggaaaaaagatttcatttgtcagcaagaacaagatagaactcgacttactacttaaacaacactatttcgtccaaatggaacaacttcaatactttcatatatccaacactgttctcgtcccagaagattgtacatacgtttcctttagacgctgtcaatctatagataagctcacagcagcagggctggcaaggaaaatcagacgcctggagaaacgtgctctatctagaggcgagcaatttgacccatcatcttttgctcaaaaagagcatactgcaatagcgcactaccactcacttggggagtccagcaaacagacgaaccgcaactttcgactcaatatcaggatgctctcggagcaaccccgtgaggggaactcgatttttagtagctatggcttatcaaattcagaaaactcgtttcagcctgtacccttaatctgagtcgacataaggagatatatcatggcgacaagtttacctacgccctcagcaattacgacttcggcgttagagtatgcattccatactcccgctcgcaatctaacgaaatctcgcggaaaaaacattcatcgttatgtcagtgtaaagatgagtaagaggattacggtagaatctactctagagtgtgatgcctgctatcactttgattttgagccaagtattgttcgcttttgcgcacaaccgattcgatttttatattatctcaatggtcagtctcactcctatgttcctgactttctagttcaatttgataccaacgagtttgttctatatgaagtaaagtcagcttatgctaagaacaaacctgattttgatgttgaatgggaggcgaaagtaaaagcagcaactgaactagggctagaattggagcttgttgaagagagtgatattagggatacggttgtattaaataatcttaagcgcatgcatcgttatgcttcgaaagatgagctgaataacgtacataactctctcttaaaaataataaagtacaatggcgcccaatctgcaagatgcttgggagaacagttgggtttaaaaggccgaactgttttaccaattttgtgcgatttgctgtcaaggtgtttactcgatacacgtttggataagcctctatctcttgaatctcgatttgagttggcctcgtacggcggttcacccaagaaaaagcgcaaggtctaactagtaggaggctcgagatgggaccgaagaaaaagagaaaagtgggatccgcgatggctaagaaagggttctcaagtttccatagaaaagcagtctcttcccaagatacgcttgaatcgatagagcttgtctctagcgctaattgtctagaaagtgttacgtatcaagatatatcagcatttcccgaaacaattgcggtagagattaatttccgattaagcattcttcgctttttagcgcgaaagtgcgaaaccattgtggccaaatcaattgaaccacatcgtgtagagctacagcaaaactatagtagaaaaatacccagtgcaataacgatatatcgatggtggcttgcttttcgaaaatcagactacaaccccattagcttagcacctaatatcaaggatagaggtaatagagagacaaaagtgtcaacagttgttgattctattatggaacaggcagttgaaagagttatatctggacgaaaagtcaatgttagctctgcatataaacgtgttcgacgaaaagttcgtcaatacaatctaactcatggaacgaaatacacgtatcctaagtacgaatctgtaagaaagcgagtaaaaaagaaaaccccatttgagttattagccgcagggaaaggggagagagtagctaagagagagtttcgccgaatgggaaaaaagatcctcacgtctagcgtgctagagagggttgaaatagatcacactgtcgttgacctttttgcagtacacgaagagtatcgaatcccattgggccgaccttggcttactcaattggttgattgttacagtaaagctgtaatcggtttttatttaggtttcgagcctcctagctatgtgtcggtttcccttgcacttaagaatgcaatacaacgcaaagatgacttaatctcctcgtatgaatcgatcgagaatgaatggctatgttatggcatcccagacctactcgtaactgataatggtaaagagtttttgtcgaaagcatttgatcaagcatgtgaatcactattgatcaatgtgcatcaaaataaagttgagacgcccgacaacaaacctcatgttgaacgtaactacgggactattaatacttctctgttagacgatttacctgggaaatccttcagccagtaccttcaaagagaagggtacgactctgtgggagaagctacccttacactcaatgagattagagaaatttacttaatttggttggtggatatttatcataaaaaacccaatcagagaggcactaattgtcctaatgttgcgtggaaaaagggttgtcaagaatgggaaccagaggagttctctggttctaaagacgaattagactttaaatttgctattgttgattacaaacaacttactaaagtagggataactgtctacaaagaactgagttatagcaatgaccgtttagctgaatatagagggaagaaaggaaaccataaagttcagttcaagtataaccctgagtgtatggcagttatttgggtgttggatgaggatatgaatgagtactttacagttaatgcgattgactacgaatatgcaagtagagtatcactttggcaacataaatataacatgaaatatcaagcagaactaaattcagcagaatatgatgaggacaaggaaattgatgcagaaataaaaattgaagaaatcgcagatcgttcaattgttaagactaacaaaatcagagctcggaggcgtggcgctaggcatcaagagaatagcgcaagggctaagtcaatcagtaatgcgaacccggcctcgatacaaaaacatgaagatgaaatcgttagtgcagataatgacgattgggatattgattatgtctgagaaatcgtcaaatgggtcctaagaaaaagaggaaagtaggctcttccatgagtgaaacgcgtgaggctcgtatatcaagagctaaaagggcatttgtatccacaccgagcgttaggaaaatcttgagttacatggatagatgtagagatctatcagacctagagtctgagcctacatgcatgatggtctatggtgcttcgggtgtaggtaaaacgaccgtcatcaagaaatacttaaatcaaaacagaagagagtccgaagccgggggcgatataataccggttttgcatattgagttgccagacaatgcgaagccagtagatgcagcaagggaattgctggttgaaatgggtgacccgctagcactttatgaaactgacttagctagattgacgaaaagactgactgaattaatccctgcggtcggcgtgaagctgattattatcgatgagttccaacatttggtggaagaaaggtcaaatcgggttcttacccaagtaggtaattggctaaaaatgatacttaacaaaacgaaatgtccaattgttatatttggtatgccatactcaaaagttgtactgcaagcaaactcgcaacttcacgggcgattttccattcaggttgaactgcgcccctttagctaccagggaggtagaggtgtatttaaaacttttttggaataccttgataaagccctaccttttgaaaaacaggctggcttagccaacgaaagtttgcagaaaaaattgtatgcattctctcagggaaacatgcgttcgttgagaaaccttatttatcaagcatctatcgaagcaattgataatcagcatgagacgataaccgaagaagatttcgtttttgcatcgaagttgacatcgggcgataaacccaactcatggaaaaatccttttgaggagggtgttgaggtaacagaagatatgttacgaccgccaccaaaagatattggttgggaggactatttgagacattcaaccccgagagtgagtaaaccaggtagaaataaaaactttttcgaataacctaggctgctgcgctgctgccaccgctgagcaataactagcataaccccttggggcctctaaacgggtcttgaggggttttttgctgaaacctcaggcatttgagaagcacacggtcacactgcttccggtagtcaataaaccggtaaaccagcaatagacataagcggctatttaacgaccctgccctgaaccgacgaccgggtcatcgtggccggatcttgcggcccctcggcttgaacgaattgttagacattatttgccgactaccttggtgatctcgcctttcacgtagtggacaaattcttccaactgatctgcgcgcgaggccaagcgatcttcttcttgtccaagataagcctgtctagcttcaagtatgacgggctgatactgggccggcaggcgctccattgcccagtcggcagcgacatccttcggcgcgattttgccggttactgcgctgtaccaaatgcgggacaacgtaagcactacatttcgctcatcgccagcccagtcgggcggcgagttccatagcgttaaggtttcatttagcgcctcaaatagatcctgttcaggaaccggatcaaagagttcctccgccgctggacctaccaaggcaacgctatgttctcttgcttttgtcagcaagatagccagatcaatgtcgatcgtggctggctcgaagatacctgcaagaatgtcattgcgctgccattctccaaattgcagttcgcgcttagctggataacgccacggaatgatgtcgtcgtgcacaacaatggtgacttctacagcgcggagaatctcgctctctccaggggaagccgaagtttccaaaaggtcgttgatcaaagctcgccgcgttgtttcatcaagccttacggtcaccgtaaccagcaaatcaatatcactgtgtggcttcaggccgccatccactgcggagccgtacaaatgtacggccagcaacgtcggttcgagatggcgctcgatgacgccaactacctctgatagttgagtcgatacttcggcgatcaccgcttccctcatactcttcctttttcaatattattgaagcatttatcagggttattgtctcatgagcggatacatatttgaatgtatttagaaaaataaacaaatagctagctcactcggtcgctacgctccgggcgtgagactgcggcgggcgctgcggacacatacaaagttacccacagattccgtggataagcaggggactaacatgtgaggcaaaacagcagggccgcgccggtggcgtttttccataggctccgccctcctgccagagttcacataaacagacgcttttccggtgcatctgtgggagccgtgaggctcaaccatgaatctgacagtacgggcgaaacccgacaggacttaaagatccccaccgtttccggcgggtcgctccctcttgcgctctcctgttccgaccctgccgtttaccggatacctgttccgcctttctcccttacgggaagtgtggcgctttctcatagctcacacactggtatctcggctcggtgtaggtcgttcgctccaagctgggctgtaagcaagaactccccgttcagcccgactgctgcgccttatccggtaactgttcacttgagtccaacccggaaaagcacggtaaaacgccactggcagcagccattggtaactgggagttcgcagaggatttgtttagctaaacacgcggttgctcttgaagtgtgcgccaaagtccggctacactggaaggacagatttggttgctgtgctctgcgaaagccagttaccacggttaagcagttccccaactgacttaaccttcgatcaaaccacctccccaggtggttttttcgtttacagggcaaaagattacgcgcagaaaaaaaggatctcaagaagatcctttgatcttttctactgaaccgctctagatttcagtgcaatttatctcttcaaatgtagcacctgaagtcagccccatacgatataagttgtaattctcatgttagtcatgccccgcgcccaccggaaggagctgactgggttgaaggctctcaagggcatcggtcgagatcccggtgcctaatgagtgagctaacttacattaattgcgttgcgctcactgcccgctttccagtcgggaaacctgtcgtgccagctgcattaatgaatcggccaacgcgcggggagaggcggtttgcgtattgggcgccagggtggtttttcttttcaccagtgagacgggcaacagctgattgcccttcaccgcctggccctgagagagttgcagcaagcggtccacgctggtttgccccagcaggcgaaaatcctgtttgatggtggttaacggcgggatataacatgagctgtcttcggtatcgtcgtatcccactaccgagatgtccgcaccaacgcgcagcccggactcggtaatggcgcgcattgcgcccagcgccatctgatcgttggcaaccagcatcgcagtgggaacgatgccctcattcagcatttgcatggtttgttgaaaaccggacatggcactccagtcgccttcccgttccgctatcggctgaatttgattgcgagtgagatatttatgccagccagccagacgcagacgcgccgagacagaacttaatgggcccgctaacagcgcgatttgctggtgacccaatgcgaccagatgctccacgcccagtcgcgtaccgtcttcatgggagaaaataatactgttgatgggtgtctggtcagagacatcaagaaataacgccggaacattagtgcaggcagcttccacagcaatggcatcctggtcatccagcggatagttaatgatcagcccactgacgcgttgcgcgagaagattgtgcaccgccgctttacaggcttcgacgccgcttcgttctaccatcgacaccaccacgctggcacccagttgatcggcgcgagatttaatcgccgcgacaatttgcgacggcgcgtgcagggccagactggaggtggcaacgccaatcagcaacgactgtttgcccgccagttgttgtgccacgcggttgggaatgtaattcagctccgccatcgccgcttccactttttcccgcgttttcgcagaaacgtggctggcctggttcaccacgcgggaaacggtctgataagagacaccggcatactctgcgacatcgtataacgttactggtttcac

SEQ ID NO: 241 - DNA, 6592 bp, Artificial Sequence
  Synthetic
gacggatcgggagatctcccgatcccctatggtcgactctcagtacaatctgctctgatgccgcatagttaagccagtatctgctccctgcttgtgtgttggaggtcgctgagtagtgcgcgagcaaaatttaagctacaacaaggcaaggcttgaccgacaattgcatgaagaatctgcttagggttaggcgttttgcgctgcttcgcgatgtacgggccagatatacgcgttgacattgattattgactagttattaatagtaatcaattacggggtcattagttcatagcccatatatggagttccgcgttacataacttacggtaaatggcccgcctggctgaccgcccaacgacccccgcccattgacgtcaataatgacgtatgttcccatagtaacgccaatagggactttccattgacgtcaatgggtggactatttacggtaaactgcccacttggcagtacatcaagtgtatcatatgccaagtacgccccctattgacgtcaatgacggtaaatggcccgcctggcattatgcccagtacatgaccttatgggactttcctacttggcagtacatctacgtattagtcatcgctattaccatggtgatgcggttttggcagtacatcaatgggcgtggatagcggtttgactcacggggatttccaagtctccaccccattgacgtcaatgggagtttgttttggcaccaaaatcaacgggactttccaaaatgtcgtaacaactccgccccattgacgcaaatgggcggtaggcgtgtacggtgggaggtctatataagcagagctctctggctaactagagaacccactgcttactggcttatcgaaattaatacgactcactatagggagacccaagcttggtaccgagctcggatccctacttccaatccaatgccaccatgggcaacgccctgaccgagatccagatcgagaagctgaggaatttcagcgactgcatcgtgatgcacccacagatcaagacaatcttcaacgactttgatgagctgaggctgaatcgcaagtttcagtccgaccagcagtgtatgctgctgatcggcgataccggcgtgggcaagtctcacacaatcaaccactacaagaagcgggtgctggccacccagaactattccagaaatacaatgcccgtgctggtgtcccggatcagccggggcaagggcctggacgccaccctggtgcagatgctggccgatctggagctgttcggcagctcccagatcaagaagcggggctacaagaccgatctgacaaagaagctggtggagtctctgatcaaggcccaggtggagctgctgatcatcaacgagttccaggagctgatcgagtttaagtctgtgcaggagagacagcagatcgccaatggcctgaagtttatcagcgaggaggccaaggtgcctatcgtgctggtgggcatgccatgggcagcaaagatcgcagaggagccacagtgggcctctaggctggtgcggaagagaaagctggagtatttcagcctgaagaacgactccaagtactttcgccagtatctgatgggcctggccaagaagatgcctttcgatgtgccccctaagctggagagcaagaacaccacaatcgccctgtttgcagcatgcaggggagagaatcgcgccctgaagcacctgctgctggaggccctgaagctggccctgagctgtaacgagtacctggagaataagcacttcatcaccgcctatgacaagtttgatttctttaacgacaaggagaagctgaagtccaagaatcctttcaagcaggacatcaaggatatcgaaatctacgaagtgatcaagaacagcagctataacccaaatgccctggaccccgaggatatgctgacagatcgggtgtttgccatcgtgaagggctccggcaagcggactgctgatggcagtgaatttgagtccccaaagaagaagagaaaggtggggagcggcaaaagaaccgccgacggcagcgaattcgagtcacccaagaagaagaggaaagtcggctccggaaaacggacagccgacggaagcgagttcgagtcaccgaaaaagaagcgaaaagtttaatctagagggccctattctatagtgtcacctaaatgctagagctcgctgatcagcctcgactgtgccttctagttgccagccatctgttgtttgcccctcccccgtgccttccttgaccctggaaggtgccactcccactgtcctttcctaataaaatgaggaaattgcatcgcattgtctgagtaggtgtcattctattctggggggtggggtggggcaggacagcaagggggaggattgggaagacaatagcaggcatgctggggatgcggtgggctctatggcttctgaggcggaaagaaccagctggggctctagggggtatccccacgcgccctgtagcggcgcattaagcgcggcgggtgtggtggttacgcgcagcgtgaccgctacacttgccagcgccctagcgcccgctcctttcgctttcttcccttcctttctcgccacgttcgccggctttccccgtcaagctctaaatcggggcatccctttagggttccgatttagtgctttacggcacctcgaccccaaaaaacttgattagggtgatggttcacgtagtgggccatcgccctgatagacggtttttcgccctttgacgttggagtccacgttctttaatagtggactcttgttccaaactggaacaacactcaaccctatctcggtctattcttttgatttataagggattttggggatttcggcctattggttaaaaaatgagctgatttaacaaaaatttaacgcgaattaattctgtggaatgtgtgtcagttagggtgtggaaagtccccaggctccccaggcaggcagaagtatgcaaagcatgcatctcaattagtcagcaaccaggtgtggaaagtccccaggctccccagcaggcagaagtatgcaaagcatgcatctcaattagtcagcaaccatagtcccgcccctaactccgcccatcccgcccctaactccgcccagttccgcccattctccgccccatggctgactaattttttttatttatgcagaggccgaggccgcctctgcctctgagctattccagaagtagtgaggaggcttttttggaggcctaggcttttgcaaaaagctcccgggagcttgtatatccattttcggatctgatcaagagacaggatgaggatcgtttcgcatgattgaacaagatggattgcacgcaggttctccggccgcttgggtggagaggctattcggctatgactgggcacaacagacaatcggctgctctgatgccgccgtgttccggctgtcagcgcaggggcgcccggttctttttgtcaagaccgacctgtccggtgccctgaatgaactgcaggacgaggcagcgcggctatcgtggctggccacgacgggcgttccttgcgcagctgtgctcgacgttgtcactgaagcgggaagggactggctgctattgggcgaagtgccggggcaggatctcctgtcatctcaccttgctcctgccgagaaagtatccatcatggctgatgcaatgcggcggctgcatacgcttgatccggctacctgcccattcgaccaccaagcgaaacatcgcatcgagcgagcacgtactcggatggaagccggtcttgtcgatcaggatgatctggacgaagagcatcaggggctcgcgccagccgaactgttcgccaggctcaaggcgcgcatgcccgacggcgaggatctcgtcgtgacccatggcgatgcctgcttgccgaatatcatggtggaaaatggccgcttttctggattcatcgactgtggccggctgggtgtggcggaccgctatcaggacatagcgttggctacccgtgatattgctgaagagcttggcggcgaatgggctgaccgcttcctcgtgctttacggtatcgccgctcccgattcgcagcgcatcgccttctatcgccttcttgacgagttcttctgagcgggactctggggttcgaaatgaccgaccaagcgacgcccaacctgccatcacgagatttcgattccaccgccgccttctatgaaaggttgggcttcggaatcgttttccgggacgccggctggatgatcctccagcgcggggatctcatgctggagttcttcgcccaccccaacttgtttattgcagcttataatggttacaaataaagcaatagcatcacaaatttcacaaataaagcatttttttcactgcattctagttgtggtttgtccaaactcatcaatgtatcttatcatgtctgtataccgtcgacctctagctagagcttggcgtaatcatggtcatagctgtttcctgtgtgaaattgttatccgctcacaattccacacaacatacgagccggaagcataaagtgtaaagcctggggtgcctaatgagtgagctaactcacattaattgcgttgcgctcactgcccgctttccagtcgggaaacctgtcgtgccagctgcattaatgaatcggccaacgcgcggggagaggcggtttgcgtattgggcgctcttccgcttcctcgctcactgactcgctgcgctcggtcgttcggctgcggcgagcggtatcagctcactcaaaggcggtaatacggttatccacagaatcaggggataacgcaggaaagaacatgtgagcaaaaggccagcaaaaggccaggaaccgtaaaaaggccgcgttgctggcgtttttccataggctccgcccccctgacgagcatcacaaaaatcgacgctcaagtcagaggtggcgaaacccgacaggactataaagataccaggcgtttccccctggaagctccctcgtgcgctctcctgttccgaccctgccgcttaccggatacctgtccgcctttctcccttcgggaagcgtggcgctttctcaatgctcacgctgtaggtatctcagttcggtgtaggtcgttcgctccaagctgggctgtgtgcacgaaccccccgttcagcccgaccgctgcgccttatccggtaactatcgtcttgagtccaacccggtaagacacgacttatcgccactggcagcagccactggtaacaggattagcagagcgaggtatgtaggcggtgctacagagttcttgaagtggtggcctaactacggctacactagaaggacagtatttggtatctgcgctctgctgaagccagttaccttcggaaaaagagttggtagctcttgatccggcaaacaaaccaccgctggtagcggtggtttttttgtttgcaagcagcagattacgcgcagaaaaaaaggatctcaagaagatcctttgatcttttctacggggtctgacgctcagtggaacgaaaactcacgttaagggattttggtcatgagattatcaaaaaggatcttcacctagatccttttaaattaaaaatgaagttttaaatcaatctaaagtatatatgagtaaacttggtctgacagttaccaatgcttaatcagtgaggcacctatctcagcgatctgtctatttcgttcatccatagttgcctgactccccgtcgtgtagataactacgatacgggagggcttaccatctggccccagtgctgcaatgataccgcgagacccacgctcaccggctccagatttatcagcaataaaccagccagccggaagggccgagcgcagaagtggtcctgcaactttatccgcctccatccagtctattaattgttgccgggaagctagagtaagtagttcgccagttaatagtttgcgcaacgttgttgccattgctacaggcatcgtggtgtcacgctcgtcgtttggtatggcttcattcagctccggttcccaacgatcaaggcgagttacatgatcccccatgttgtgcaaaaaagcggttagctccttcggtcctccgatcgttgtcagaagtaagttggccgcagtgttatcactcatggttatggcagcactgcataattctcttactgtcatgccatccgtaagatgcttttctgtgactggtgagtactcaaccaagtcattctgagaatagtgtatgcggcgaccgagttgctcttgcccggcgtcaatacgggataataccgcgccacatagcagaactttaaaagtgctcatcattggaaaacgttcttcggggcgaaaactctcaaggatcttaccgctgttgagatccagttcgatgtaacccactcgtgcacccaactgatcttcagcatcttttactttcaccagcgtttctgggtgagcaaaaacaggaaggcaaaatgccgcaaaaaagggaataagggcgacacggaaatgttgaatactcatactcttcctttttcattattattgaagcatttatcagggttattgtctcatgagcggatacatatttgaatgtatttagaaaaataaacaaataggggttccgcgcacatttccccgaaaagtgccacctgacgtc

SEQ ID NO: 242 - DNA, 3092 bp, Artificial Sequence
  Synthetic
ctggagtgaataccacgacgatttccggcagtttctacacatatattcgcaagatgtggcgtgttacggtgaaaacctggcctatttccctaaagggtttattgagaatatgtttttcgtctcagccaatccctgggtgagtttcaccagttttgatttaaacgtggccaatatggacaacttcttcgcccccgttttcactatgggcaaatattatacgcaaggcgacaaggtgctgatgccgctggcgattcaggttcatcatgccgtctgtgatggcttccatgtcggcagaatgcttaatgaattacaacagtactgcgatgagtggcagggcggggcgtaatttttttaaggcagttattggtgcccttctagagtccttactgcagtagttttgctgaaatactcgattcacaaaaatatcaacttatggttgttttgtgagatatcaatatatggttgttttgtggttaagttgctgattataaataattattaaatatcactttatggttgcatcaacaggtaccttaagccaacctgttaggatccctctagagtagtagtccatgggtatggacagcggtggaggggaattcccatgtcagccgttaagtgttcctgtgtcactcaaaattgctttgagaggctctaagggcttctcagtgcgttacatccctggcttgttgtccacaaccgttaaaccttaaaagctttaaaagccttatatattcttttttttcttataaaacttaaaaccttagaggctatttaagttgctgatttatattaattttattgttcaaacatgagagcttagtacgtgaaacatgagagcttagtacgttagccatgagagcttagtacgttagccatgagggtttagttcgttaaacatgagagcttagtacgttaaacatgagagcttagtacgtgaaacatgagagcttagtacgtactatcaacaggttgaactgctgatcttcagatcctctacgccggacgcatcgtggccggatcaattccgttttccgctgcataaccctgcttcggggtcattatagcgattttttcggtatatccatcctttttcgcacgatatacaggattttgccaaagggttcgtgtagactttccttggtgtatccaacggcgtcagccgggcaggataggtgaagtaggcccacccgcgagcgggtgttccttcttcactgtcccttattcgcacctggcggtgctcaacgggaatcctgctctgcgaggctggccggctaccgccggcgtaacagatgagggcaagcggatggctgatgaaaccaagccaaccaggaagggcagcccacctatcacggaattgatccccctcgaattgacgcgtaaccagcaatagacataagcggctatttaacgaccctgccctgaaccgacgaccgggtcgaatttgctttcgaatttctgccattcatccgcttattatcacttattcaggcgtagcaaccaggcgtttaagggcaccaataactgccttaaaaaaattagaaaaactcatcgagcatcaaatgaaactgcaatttattcatatcaggattatcaataccatatttttgaaaaagccgtttctgtaatgaaggagaaaactcaccgaggcagttccataggatggcaagatcctggtatcggtctgcgattccgactcgtccaacatcaatacaacctattaatttcccctcgtcaaaaataaggttatcaagtgagaaatcaccatgagtgacgactgaatccggtgagaatggcaaaagtttatgcatttctttccagacttgttcaacaggccagccattacgctcgtcatcaaaatcactcgcatcaaccaaaccgttattcattcgtgattgcgcctgagcgagacgaaatacgcgatcgctgttaaaaggacaattacaaacaggaatcgaatgcaaccggcgcaggaacactgccagcgcatcaacaatattttcacctgaatcaggatattcttctaatacctggaatgctgtttttccggggatcgcagtggtgagtaaccatgcatcatcaggagtacggataaaatgcttgatggtcggaagaggcataaattccgtcagccagtttagtctgaccatctcatctgtaacatcattggcaacgctacctttgccatgtttcagaaacaactctggcgcatcgggcttcccatacaagcgatagattgtcgcacctgattgcccgacattatcgcgagcccatttatacccatataaatcagcatccatgttggaatttaatcgcggcctcgacgtttcccgttgaatatggctcatactcttcctttttcaatattattgaagcatttatcagggttattgtctcatgagcggatacatatttgaatgtatttagaaaaataaacaaataggggttccgcgcacatttccccgaaaagtgccacctgacgtctaagaaaccattattatcatgacattaacctataaaaataggcgtatcacgaggccctttcgtcacgcgtcctcggtacctaacaccggtcgccaagctttgttgatacaaccataaaatgataattacacccataaattgataattatcacacccagatcaggacgctcgacctggagaattcgccaccatgatcggcacgtaagaggttccaactttcaccataatgaaataagatcactaccgggcgtattttttgagttatcgagattttcaggagctaaggaagctaaaatggagaaaaaaatcactggatataccaccgttgatatatcccaatggcatcgtaaagaacattttgaggcatttcagtcagttgctcaatgtacctataaccagaccgttcagctggatattacggcctttttaaagaccgtaaagaaaaataagcacaagttttatccggcctttattcacattcttgcccgcctgatgaatgctcatccggagttccgtatggcaatgaaagacggtgagctggtgatatgggatagtgttcacccttgttacaccgttttccatgagcaaactgaaacgttttcatcgct

SEQ ID NO: 243 - DNA, 3028 bp, Artificial Sequence
  Synthetic
ttgagatcctttttttctgcgcgtaatctgctgcttgcaaacaaaaaaaccaccgctaccagcggtggtttgtttgccggatcaagagctaccaactctttttccgaaggtaactggcttcagcagagcgcagataccaaatactgttcttctagtgtagccgtagttaggccaccacttcaagaactctgtagcaccgcctacatacctcgctctgctaatcctgttaccagtggctgctgccagtggcgataagtcgtgtcttaccgggttggactcaagacgatagttaccggataaggcgcagcggtcgggctgaacggggggttcgtgcacacagcccagcttggagcgaacgacctacaccgaactgagatacctacagcgtgagctatgagaaagcgccacgcttcccgaagggagaaaggcggacaggtatccggtaagcggcagggtcggaacaggagagcgcacgagggagcttccagggggaaacgcctggtatctttatagtcctgtcgggtttcgccacctctgacttgagcgtcgatttttgtgatgctcgtcaggggggcggagcctatggaaaaacgccagcaacgcggcctttttacggttcctggccttttgctggccttttgctcacatgttctttcctgcgttatcccctgattctgtggataaccgtattaccgcctttgagtgagctgataccgctcgccgcagccgaacgaccgagcgcagcgagtcagtgagcgaggaagcggaagagcgtgttgatcggctttaaggatctagtgtcgctgcaaccatagtttgacataatgcaaccataccttgacataattaaagtcatactctgacataaagccccctggagaattcgccaccatgatcggcacgtaagaggttccaactttcaccataatgaaataagatcactaccgggcgtattttttgagttatcgagattttcaggagctaaggaagctaaaatggagaaaaaaatcactggatataccaccgttgatatatcccaatggcatcgtaaagaacattttgaggcatttcagtcagttgctcaatgtacctataaccagaccgttcagctggatattacggcctttttaaagaccgtaaagaaaaataagcacaagttttatccggcctttattcacattcttgcccgcctgatgaatgctcatccggagttccgtatggcaatgaaagacggtgagctggtgatatgggatagtgttcacccttgttacaccgttttccatgagcaaactgaaacgttttcatcgctctggagtgaataccacgacgatttccggcagtttctacacatatattcgcaagatgtggcgtgttacggtgaaaacctggcctatttccctaaagggtttattgagaatatgtttttcgtctcagccaatccctgggtgagtttcaccagttttgatttaaacgtggccaatatggacaacttcttcgcccccgttttcactatgggcaaatattatacgcaaggcgacaaggtgctgatgccgctggcgattcaggttcatcatgccgtctgtgatggcttccatgtcggcagaatgcttaatgaattacaacagtactgcgatgagtggcagggcggggcgtaatttttttaaggcagttattggtgcccttctagagtcggctggtttttttgtttttagcgttataacttttatttcactatgtcactgtatggttgcattttatgtcagtgaatggttgcaggttttttgtaagttattgatatgcctatccagtgtatgtcacgctttgcttgcagcgacatctaggatcttagcgcgcttttatggacgtcaggtggcacttttcggggaaatgtgcgcggaacccctatttgtttatttttctaaatacattcaaatatgtatccgctcatgagacaataaccctgataaatgcttcaataatattgaaaaaggaagagtatgagtattcaacatttccgtgtcgcccttattcccttttttgcggcattttgccttcctgtttttgctcacccagaaacgctggtgaaagtaaaagatgctgaagatcagttgggtgcacgagtgggttacatcgaactggatctcaacagcggtaagatccttgagagttttcgccccgaagaacgttttccaatgatgagcacttttaaagttctgctatgtggcgcggtattatcccgtattgacgccgggcaagagcaactcggtcgccgcatacactattctcagaatgacttggttgagtactcaccagtcacagaaaagcatcttacggatggcatgacagtaagagaattatgcagtgctgccataaccatgagtgataacactgcggccaacttacttctgacaacgatcggaggaccgaaggagctaaccgcttttttgcacaacatgggggatcatgtaactcgccttgatcgttgggaaccggagctgaatgaagccataccaaacgacgagcgtgacaccacgatgcctgtagcaatggcaacaacgttgcgcaaactattaactggcgaactacttactctagcttcccggcaacaattaatagactggatggaggcggataaagttgcaggaccacttctgcgctcggcccttccggctggctggtttattgctgataaatctggagccggtgagcgtgggtctcgcggtatcattgcagcactggggccagatggtaagccctcccgtatcgtagttatctacacgacggggagtcaggcaactatggatgaacgaaatagacagatcgctgagataggtgcctcactgattaagcattggtaactgtcagaccaagtttactcatatatactttagattgatttaaaacttcatttttaatttaaaaggatctaggtgaagatcctttttgataatctcatgaccaaaatcccttaacgtgagttttcgttccactgagcgtcagaccccgtagaaaagatcaaaggatcttc

SEQ ID NO: 244 - DNA, 6740 bp, Artificial Sequence
  Synthetic
gacggatcgggagatctcccgatcccctatggtcgactctcagtacaatctgctctgatgccgcatagttaagccagtatctgctccctgcttgtgtgttggaggtcgctgagtagtgcgcgagcaaaatttaagctacaacaaggcaaggcttgaccgacaattgcatgaagaatctgcttagggttaggcgttttgcgctgcttcgcgatgtacgggccagatatacgcgttgacattgattattgactagttattaatagtaatcaattacggggtcattagttcatagcccatatatggagttccgcgttacataacttacggtaaatggcccgcctggctgaccgcccaacgacccccgcccattgacgtcaataatgacgtatgttcccatagtaacgccaatagggactttccattgacgtcaatgggtggactatttacggtaaactgcccacttggcagtacatcaagtgtatcatatgccaagtacgccccctattgacgtcaatgacggtaaatggcccgcctggcattatgcccagtacatgaccttatgggactttcctacttggcagtacatctacgtattagtcatcgctattaccatggtgatgcggttttggcagtacatcaatgggcgtggatagcggtttgactcacggggatttccaagtctccaccccattgacgtcaatgggagtttgttttggcaccaaaatcaacgggactttccaaaatgtcgtaacaactccgccccattgacgcaaatgggcggtaggcgtgtacggtgggaggtctatataagcagagctctctggctaactagagaacccactgcttactggcttatcgaaattaatacgactcactatagggagacccaagcttggtaccgagctcggccaccatgggaagcggcgaggccagcggttccggacgggctgacgcattggacgattttgatctggatatgctgggaagtgacgccctcgatgattttgaccttgacatgcttggttcggatgcccttgatgactttgacctcgacatgctcggcagtgacgcccttgatgatttcgacctggacatgctgattaactctagaggtggtagtggtgggagcggtggcaaacggacagccgacggaagcgagttcgagtcaccgaaaaagaagcgaaaagttggctccggaatgaagctgccaaccaacctggcctacgagcggagcatcgaccccagcgacgtgtgcttcttcgtggtgtggccagacgataggaaaacccccctgacatacaattcccgcacactgctgggacagatggaggcagccagcctggcatacgacgtgtccggccagcctatcaagtctgccaccgcagaggccctggcacagggcaaccctcaccaggtggatttctgccatgtgccatacggcgccagccacatcgagtgtagcttctccgtgtcttttagctccgagctgcggcagccatataagtgtaattctagcaaggtgaagcagacactggtgcagctggtggagctgtacgaaaccaagatcggctggacagagctggccacccggtatctgatgaatatctgcaacggcaagtggctgtggaagaatacaagaaaggcctactgttggaacatcgtgctgaccccctggccttggaatggcgagaaagtgggcttcgaggacatcaggaccaactatacatcccgccaggacttcaagaacaataagaattggtctgccatcgtggagatgatcaagacagccttctcctctaccgacggcctggccatctttgaggtgagggccacactgcacctgccaaccaacgcaatggtgcgccctagccaggtgttcacagagaaggagagcggctccaagtctaagagcaagacccagaactctagggtgttccagagcaccacaatcgatggagagcggagcccaatcctgggagcctttaagacaggcgccgccatcgccaccatcgacgattggtatccagaggcaaccgagcctctgagggtgggccgctttggagtgcacagggaggacgtgacatgctacagacacccatctaccggcaaggatttctttagcatcctccagcaggccgagcactatatcgaggtgctgagtgccaacaagacacccgcccaggaaaccatcaatgacatgcacttcctgatggccaacctgatcaagggcggcatgtttcagcacaagggcgactaattacattggaagtggataatctagagggccctattctatagtgtcacctaaatgctagagctcgctgatcagcctcgactgtgccttctagttgccagccatctgttgtttgcccctcccccgtgccttccttgaccctggaaggtgccactcccactgtcctttcctaataaaatgaggaaattgcatcgcattgtctgagtaggtgtcattctattctggggggtggggtggggcaggacagcaagggggaggattgggaagacaatagcaggcatgctggggatgcggtgggctctatggcttctgaggcggaaagaaccagctggggctctagggggtatccccacgcgccctgtagcggcgcattaagcgcggcgggtgtggtggttacgcgcagcgtgaccgctacacttgccagcgccctagcgcccgctcctttcgctttcttcccttcctttctcgccacgttcgccggctttccccgtcaagctctaaatcggggcatccctttagggttccgatttagtgctttacggcacctcgaccccaaaaaacttgattagggtgatggttcacgtagtgggccatcgccctgatagacggtttttcgccctttgacgttggagtccacgttctttaatagtggactcttgttccaaactggaacaacactcaaccctatctcggtctattcttttgatttataagggattttggggatttcggcctattggttaaaaaatgagctgatttaacaaaaatttaacgcgaattaattctgtggaatgtgtgtcagttagggtgtggaaagtccccaggctccccaggcaggcagaagtatgcaaagcatgcatctcaattagtcagcaaccaggtgtggaaagtccccaggctccccagcaggcagaagtatgcaaagcatgcatctcaattagtcagcaaccatagtcccgcccctaactccgcccatcccgcccctaactccgcccagttccgcccattctccgccccatggctgactaattttttttatttatgcagaggccgaggccgcctctgcctctgagctattccagaagtagtgaggaggcttttttggaggcctaggcttttgcaaaaagctcccgggagcttgtatatccattttcggatctgatcaagagacaggatgaggatcgtttcgcatgattgaacaagatggattgcacgcaggttctccggccgcttgggtggagaggctattcggctatgactgggcacaacagacaatcggctgctctgatgccgccgtgttccggctgtcagcgcaggggcgcccggttctttttgtcaagaccgacctgtccggtgccctgaatgaactgcaggacgaggcagcgcggctatcgtggctggccacgacgggcgttccttgcgcagctgtgctcgacgttgtcactgaagcgggaagggactggctgctattgggcgaagtgccggggcaggatctcctgtcatctcaccttgctcctgccgagaaagtatccatcatggctgatgcaatgcggcggctgcatacgcttgatccggctacctgcccattcgaccaccaagcgaaacatcgcatcgagcgagcacgtactcggatggaagccggtcttgtcgatcaggatgatctggacgaagagcatcaggggctcgcgccagccgaactgttcgccaggctcaaggcgcgcatgcccgacggcgaggatctcgtcgtgacccatggcgatgcctgcttgccgaatatcatggtggaaaatggccgcttttctggattcatcgactgtggccggctgggtgtggcggaccgctatcaggacatagcgttggctacccgtgatattgctgaagagcttggcggcgaatgggctgaccgcttcctcgtgctttacggtatcgccgctcccgattcgcagcgcatcgccttctatcgccttcttgacgagttcttctgagcgggactctggggttcgaaatgaccgaccaagcgacgcccaacctgccatcacgagatttcgattccaccgccgccttctatgaaaggttgggcttcggaatcgttttccgggacgccggctggatgatcctccagcgcggggatctcatgctggagttcttcgcccaccccaacttgtttattgcagcttataatggttacaaataaagcaatagcatcacaaatttcacaaataaagcatttttttcactgcattctagttgtggtttgtccaaactcatcaatgtatcttatcatgtctgtataccgtcgacctctagctagagcttggcgtaatcatggtcatagctgtttcctgtgtgaaattgttatccgctcacaattccacacaacatacgagccggaagcataaagtgtaaagcctggggtgcctaatgagtgagctaactcacattaattgcgttgcgctcactgcccgctttccagtcgggaaacctgtcgtgccagctgcattaatgaatcggccaacgcgcggggagaggcggtttgcgtattgggcgctcttccgcttcctcgctcactgactcgctgcgctcggtcgttcggctgcggcgagcggtatcagctcactcaaaggcggtaatacggttatccacagaatcaggggataacgcaggaaagaacatgtgagcaaaaggccagcaaaaggccaggaaccgtaaaaaggccgcgttgctggcgtttttccataggctccgcccccctgacgagcatcacaaaaatcgacgctcaagtcagaggtggcgaaacccgacaggactataaagataccaggcgtttccccctggaagctccctcgtgcgctctcctgttccgaccctgccgcttaccggatacctgtccgcctttctcccttcgggaagcgtggcgctttctcaatgctcacgctgtaggtatctcagttcggtgtaggtcgttcgctccaagctgggctgtgtgcacgaaccccccgttcagcccgaccgctgcgccttatccggtaactatcgtcttgagtccaacccggtaagacacgacttatcgccactggcagcagccactggtaacaggattagcagagcgaggtatgtaggcggtgctacagagttcttgaagtggtggcctaactacggctacactagaaggacagtatttggtatctgcgctctgctgaagccagttaccttcggaaaaagagttggtagctcttgatccggcaaacaaaccaccgctggtagcggtggtttttttgtttgcaagcagcagattacgcgcagaaaaaaaggatctcaagaagatcctttgatcttttctacggggtctgacgctcagtggaacgaaaactcacgttaagggattttggtcatgagattatcaaaaaggatcttcacctagatccttttaaattaaaaatgaagttttaaatcaatctaaagtatatatgagtaaacttggtctgacagttaccaatgcttaatcagtgaggcacctatctcagcgatctgtctatttcgttcatccatagttgcctgactccccgtcgtgtagataactacgatacgggagggcttaccatctggccccagtgctgcaatgataccgcgagacccacgctcaccggctccagatttatcagcaataaaccagccagccggaagggccgagcgcagaagtggtcctgcaactttatccgcctccatccagtctattaattgttgccgggaagctagagtaagtagttcgccagttaatagtttgcgcaacgttgttgccattgctacaggcatcgtggtgtcacgctcgtcgtttggtatggcttcattcagctccggttcccaacgatcaaggcgagttacatgatcccccatgttgtgcaaaaaagcggttagctccttcggtcctccgatcgttgtcagaagtaagttggccgcagtgttatcactcatggttatggcagcactgcataattctcttactgtcatgccatccgtaagatgcttttctgtgactggtgagtactcaaccaagtcattctgagaatagtgtatgcggcgaccgagttgctcttgcccggcgtcaatacgggataataccgcgccacatagcagaactttaaaagtgctcatcattggaaaacgttcttcggggcgaaaactctcaaggatcttaccgctgttgagatccagttcgatgtaacccactcgtgcacccaactgatcttcagcatcttttactttcaccagcgtttctgggtgagcaaaaacaggaaggcaaaatgccgcaaaaaagggaataagggcgacacggaaatgttgaatactcatactcttcctttttcattattattgaagcatttatcagggttattgtctcatgagcggatacatatttgaatgtatttagaaaaataaacaaataggggttccgcgcacatttccccgaaaagtgccacctgacgtc

SEQ ID NO: 245 - DNA, 2860 bp, Artificial Sequence
  Synthetic
ctgtcagaccaagtttactcatatatactttagattgatttaaaacttcatttttaatttaaaaggatctaggtgaagatcctttttgataatctcatgaccaaaatcccttaacgtgagttttcgttccactgagcgtcagaccccgtagaaaagatcaaaggatcttcttgagatcctttttttctgcgcgtaatctgctgcttgcaaacaaaaaaaccaccgctaccagcggtggtttgtttgccggatcaagagctaccaactctttttccgaaggtaactggcttcagcagagcgcagataccaaatactgttcttctagtgtagccgtagttaggccaccacttcaagaactctgtagcaccgcctacatacctcgctctgctaatcctgttaccagtggctgctgccagtggcgataagtcgtgtcttaccgggttggactcaagacgatagttaccggataaggcgcagcggtcgggctgaacggggggttcgtgcacacagcccagcttggagcgaacgacctacaccgaactgagatacctacagcgtgagctatgagaaagcgccacgcttcccgaagggagaaaggcggacaggtatccggtaagcggcagggtcggaacaggagagcgcacgagggagcttccagggggaaacgcctggtatctttatagtcctgtcgggtttcgccacctctgacttgagcgtcgatttttgtgatgctcgtcaggggggcggagcctatggaaaaacgccagcaacgcggcctttttacggttcctggccttttgctggccttttgctcacatgttctttcctgcgttatcccctgattctgtggataaccgtattaccgcctttgagtgagctgataccaccggtcaagctttgttgatacaaccataaaatgataattacacccataaattgataattatcacacccaaggaggtaaataatggagaaaaaaatcactggatataccaccgttgatatatcccaatggcatcgtaaagaacattttgaggcatttcagtcagttgctcaatgtacctataaccagaccgttcagctggatattacggcctttttaaagaccgtaaagaaaaataagcacaagttttatccggcctttattcacattcttgcccgcctgatgaatgctcatccggagttccgtatggcaatgaaagacggtgagctggtgatatgggatagtgttcacccttgttacaccgttttccatgagcaaactgaaacgttttcatcgctctggagtgaataccacgacgatttccggcagtttctacacatatattcgcaagatgtggcgtgttacggtgaaaacctggcctatttccctaaagggtttattgagaatatgtttttcgtctcagccaatccctgggtgagtttcaccagttttgatttaaacgtggccaatatggacaacttcttcgcccccgttttcactatgggcaaatattatacgcaaggcgacaaggtgctgatgccgctggcgattcaggttcatcatgccgtttgtgatggcttccatgtcggcagaatgcttaatgaattacaacagtactgcgatgagtggcagggcggggcgtaatttttttaaggcagttattggtgcccttctagagtccttactgcagtagttttgctgaaatactcgattcacaaaaatatcaacttatggttgttttgtgagatatcaatatatggttgttttgtggttaagttgctgattataaataattattaaatatcactttatggttgcatcaacaggtacccctaggtccaagctcgttccgttattaggattaagctggaagagccttagacgtcaggtggcacttttcggggaaatgtgcgcggaacccctatttgtttatttttctaaatacattcaaatatgtatccgctcatgagacaataaccctgataaatgcttcaataatattgaaaaaggaagagtatgagtattcaacatttccgtgtcgcccttattcccttttttgcggcattttgccttcctgtttttgctcacccagaaacgctggtgaaagtaaaagatgctgaagatcagttgggtgcacgagtgggttacatcgaactggatctcaacagcggtaagatccttgagagttttcgccccgaagaacgttttccaatgatgagcacttttaaagttctgctatgtggcgcggtattatcccgtattgacgccgggcaagagcaactcggtcgccgcatacactattctcagaatgacttggttgagtactcaccagtcacagaaaagcatcttacggatggcatgacagtaagagaattatgcagtgctgccataaccatgagtgataacactgcggccaacttacttctgacaacgatcggaggaccgaaggagctaaccgcttttttgcacaacatgggggatcatgtaactcgccttgatcgttgggaaccggagctgaatgaagccataccaaacgacgagcgtgacaccacgatgcctgtagcaatggcaacaacgttgcgcaaactattaactggcgaactacttactctagcttcccggcaacaattaatagactggatggaggcggataaagttgcaggaccacttctgcgctcggcccttccggctggctggtttattgctgataaatctggagccggtgagcgtgggtctcgcggtatcattgcagcactggggccagatggtaagccctcccgtatcgtagttatctacacgacggggagtcaggcaactatggatgaacgaaatagacagatcgctgagataggtgcctcactgattaagcattggtaa

SEQ ID NO: 246 - DNA, 8445 bp, Artificial Sequence
  Synthetic
attcaccaccctgaattgactctcttccgggcgctatcatgccataccgcgaaaggttttgcgccattcgatggtgtccgggatctcgacgctctcccttatgcgactcctgcattaggaaattaatacgactcactataggggaattgtgagcggataacaattcccctgtagaaataattttgtttaactttaataaggagatataccatgggtgaactgccgagtaggtagctgataacgagacctctgtcttgtcagctagggtggtctcgtgaactgccgagtaggtagctgataacggatccgaattcgagctcggcgcgcctgcaggtcgacaagcttgcggccgcataatgcttaagtcgaacagaaagtaatcgtattgtacacggccgcataatcgaaattaatacgactcactataggggaattgtgagcggataacaattccccatcttagtatattagttaagtataagaaggagatatacatatgtttttgcaaagacctaaaccttacagcgatgaaagtttagaaagtttctttatccgagtggctaacaaaaatggctacggtgatgtccatcgcttcctagaagccactaaacgattccttcaagacattgaccataatggctatcaaacctttccgactgatataactcggataaacccatactcagctaaaaacagttccagcgcacgaactgcgtcattcctgaaacttgcacaattgacatttaatgaaccgccagagctacttgggttggcaattaacagaacaaacatgaaatactcgccgtcaactagcgcggttgttagaggtgcagaagtctttcctcgcagtttactacggacgcactccatcccctgctgtcctttgtgtctgcgagaaaatggctacgcctcctacctttggcactttcaggggtacgaatactgccacagccataacgtacctttaattaccacttgtagctgtggtaaggagtttgactaccgagtatctgggttaaagggcatttgctgcaaatgcaaggagcctatcaccttaaccagcagggagaacggtcatgaggcagcgtgtactgtttcaaactggcttgctggccatgaatctaaacctctgccaaatcttcctaaaagctaccgatggggtttagttcattggtggatgggtattaaagatagcgagttcgatcacttttcgttcgttcaatttttctcaaactggccaaggtcattccactcgataatcgaagatgaagtagagttcaaccttgagcatgctgttgtcagcacgtctgaattacgactaaaagatcttcttggtcgattgtttttcggttcaattcggttacctgagcggaatcttcaacacaatatcatccttggtgagcttctctgctatttagaaaatcgtttatggcaagacaagggattaatcgccaacctcaaaatgaacgcgttagaggcgactgtaatgttaaattgtagcctcgatcagattgcatcaatggttgaacaacgcatcttgaagccaaatcgaaaaagcaagcccaacagccctcttgatgttaccgattatctatttcatttcggcgatattttctgtctttggttagctgagttccaaagcgatgagtttaaccgttcgttttatgtgtcgaggtggtaaatgcaaactctgaaagaactaatcgcatccaatcctgacgacttaacaactgaacttaagagagcatttcgtccactcacaccgcatattgcaattgatggtaatgaacttgacgcactgacgatattagtcaatttaaccgataagactgatgatcagaaagacctgctcgatcgagccaaatgcaagcaaaaacttcgagatgaaaaatggtgggctagctgcataaattgcgttaattacagacaaagccataacccaaaattcccggatatacgttctgaaggcgtgattcgaacccaagccctgggtgaattaccgagtttcctactctcgtcctcaaaaatcccaccataccattggtcatatagccatgattcaaaatacgtcaacaaaagcgcattcctcaccaatgagttttgttgggatggtgagatctcatgtttgggtgagcttcttaaagatgcagatcacccactttggaatactttgaaaaagttaggttgttctcaaaaaacttgcaaagcaatggcaaaacaactagctgatattactctcacgactatcaatgtcacactcgcaccaaattacctgactcaaatatctctccccgatagtgatacatcctacatttcactctctcctgttgcatcgctatcgatgcaaagccactttcatcagaggctccaagatgaaaatcggcatagcgcgataacgcggtttagccgaactaccaacatgggggtcactgcgatgacatgtggcggcgcatttagaatgttaaagtctggcgctaagttttccagcccccctcatcaccgattaaacagtaaacgaagttggttgacgtcagagcatgttcagtcattaaaacagtaccagcgcctcaacaaaagcctcatacctgaaaactctcggattgcactccgtagaaaatacaaaatcgagcttcaaaatatggtcagatcttggtttgcaatgcaagaccatacccttgattcgaacatacttatccaacatttgaatcatgacctatcttacttaggagccacaaaacgttttgcatacgatccagcgatgaccaagctctttactgagcttttgaaacgagagttatcaaattcaatcaataatggtgagcaacacactaatggatcgtttttagtcctaccgaatatcagggtttgtggcgcaacagctttaagctccccggtaacggtggggattccatcacttacagctttctttggcttcgttcacgcatttgaacggaatataaatcgcaccacctcatcgtttcgtgttgaatcctttgcgatatgcgtccatcaactacatgtcgagaagcgaggtttgacagcagagtttgtggaaaaaggcgacgggactatatccgctcccgcgacccgggatgactggcagtgtgatgtcgtatttagccttattttgaacaccaactttgctcaacatattgaccaagatacgttagttacatcactaccaaagcgattggctcggggttcagcaaaaattgcgattgatgactttaaacatatcaactcattctcgacattagaaacagcgatcgaatctctgccaatagaagctggtaggtggttatcactttacgcacagtcaaacaataatctaagtgatctattagcagccatgacagaggaccatcagctcatggcaagctgcgtcggttaccacttgttagaagagcccaaagataaaccaaactccctcagaggttacaaacacgctatcgccgagtgcatcattggactcattaactcaatcacctttagctcagagactgatcccaacacaatcttttggtcgctaaagaactatcaaaactacctagtggtacagccaaggagtatcaacgatgaaactaccgacaaatctagcctatgagcgctctatcgacccatcagatgtctgtttttttgtcgtctggcccgatgatagaaaaacacctttaacctacaattctcgtactctgctcgggcaaatggaagcggcatcattagcctatgatgtctcaggtcaaccaataaaaagtgccaccgctgaggcgttagctcaagggaaccctcatcaagttgatttctgccacgttccatacggtgcgagtcatattgaatgcagtttctccgtctcgttttcttctgaactacgtcaaccatataagtgtaactcaagcaaagttaaacaaacgctagtgcaattagtcgagctctacgaaacgaaaatcggctggactgagctagcaacccgatatttgatgaacatttgcaacggtaaatggctgtggaaaaatacccgtaaagcctattgctggaacattgtacttacaccttggccttggaacggggaaaaggttggatttgaagatattcgtactaactacacctcacggcaagactttaaaaataataaaaattggtctgctatagttgaaatgatcaaaaccgcattttctagtactgatgggctggcgatatttgaagtcagggccaccttgcacttgccaacgaatgctatggtgcggccaagccaagttttcacagaaaaagaaagtggcagtaaaagtaaatctaaaactcaaaacagtcgagtttttcagagtacaactattgatggtgaacgatcgccaatactaggggcctttaaaacgggagcagctattgcaaccattgacgactggtatcctgaagccactgagccactaagggtcggacggtttggggttcatcgcgaagatgtcacttgctaccgtcatccgtctaccggaaaagattttttctcgatattacaacaagcagagcactatattgaagtgttgagcgccaacaaaactcccgctcaagaaactatcaacgacatgcactttttaatggctaacctgattaagggtgggatgttccagcataaaggagactgactgtgaaatggtattataagacaatcacctttctgccagagttgtgcaacaacgagtcactggctgcaaagtgtctccgcgttctgcatggatttaactatcagtatgagacacgaaatatcggcgtttcatttccgctttggtgtgatgcaacggttggaaaaaagatttcatttgtcagcaagaacaagatagaactcgacttactacttaaacaacactatttcgtccaaatggaacaacttcaatactttcatatatccaacactgttctcgtcccagaagattgtacatacgtttcctttagacgctgtcaatctatagataagctcacagcagcagggctggcaaggaaaatcagacgcctggagaaacgtgctctatctagaggcgagcaatttgacccatcatcttttgctcaaaaagagcatactgcaatagcgcactaccactcacttggggagtccagcaaacagacgaaccgcaactttcgactcaatatcaggatgctctcggagcaaccccgtgaggggaactcgatttttagtagctatggcttatcaaattcagaaaactcgtttcagcctgtacccttaatctgacctaggctgctgccaccgctgagcaataactagcataaccccttggggcctctaaacgggtcttgaggggttttttgctgaaacctcaggcatttgagaagcacacggtcacactgcttccggtagtcaataaaccggtaaaccagcaatagacataagcggctatttaacgaccctgccctgaaccgacgaccgggtcatcgtggccggatcttgcggcccctcggcttgaacgaattgttagacattatttgccgactaccttggtgatctcgcctttcacgtagtggacaaattcttccaactgatctgcgcgcgaggccaagcgatcttcttcttgtccaagataagcctgtctagcttcaagtatgacgggctgatactgggccggcaggcgctccattgcccagtcggcagcgacatccttcggcgcgattttgccggttactgcgctgtaccaaatgcgggacaacgtaagcactacatttcgctcatcgccagcccagtcgggcggcgagttccatagcgttaaggtttcatttagcgcctcaaatagatcctgttcaggaaccggatcaaagagttcctccgccgctggacctaccaaggcaacgctatgttctcttgcttttgtcagcaagatagccagatcaatgtcgatcgtggctggctcgaagatacctgcaagaatgtcattgcgctgccattctccaaattgcagttcgcgcttagctggataacgccacggaatgatgtcgtcgtgcacaacaatggtgacttctacagcgcggagaatctcgctctctccaggggaagccgaagtttccaaaaggtcgttgatcaaagctcgccgcgttgtttcatcaagccttacggtcaccgtaaccagcaaatcaatatcactgtgtggcttcaggccgccatccactgcggagccgtacaaatgtacggccagcaacgtcggttcgagatggcgctcgatgacgccaactacctctgatagttgagtcgatacttcggcgatcaccgcttccctcatactcttcctttttcaatattattgaagcatttatcagggttattgtctcatgagcggatacatatttgaatgtatttagaaaaataaacaaatagctagctcactcggtcgctacgctccgggcgtgagactgcggcgggcgctgcggacacatacaaagttacccacagattccgtggataagcaggggactaacatgtgaggcaaaacagcagggccgcgccggtggcgtttttccataggctccgccctcctgccagagttcacataaacagacgcttttccggtgcatctgtgggagccgtgaggctcaaccatgaatctgacagtacgggcgaaacccgacaggacttaaagatccccaccgtttccggcgggtcgctccctcttgcgctctcctgttccgaccctgccgtttaccggatacctgttccgcctttctcccttacgggaagtgtggcgctttctcatagctcacacactggtatctcggctcggtgtaggtcgttcgctccaagctgggctgtaagcaagaactccccgttcagcccgactgctgcgccttatccggtaactgttcacttgagtccaacccggaaaagcacggtaaaacgccactggcagcagccattggtaactgggagttcgcagaggatttgtttagctaaacacgcggttgctcttgaagtgtgcgccaaagtccggctacactggaaggacagatttggttgctgtgctctgcgaaagccagttaccacggttaagcagttccccaactgacttaaccttcgatcaaaccacctccccaggtggttttttcgtttacagggcaaaagattacgcgcagaaaaaaaggatctcaagaagatcctttgatcttttctactgaaccgctctagatttcagtgcaatttatctcttcaaatgtagcacctgaagtcagccccatacgatataagttgtaattctcatgttagtcatgccccgcgcccaccggaaggagctgactgggttgaaggctctcaagggcatcggtcgagatcccggtgcctaatgagtgagctaacttacattaattgcgttgcgctcactgcccgctttccagtcgggaaacctgtcgtgccagctgcattaatgaatcggccaacgcgcggggagaggcggtttgcgtattgggcgccagggtggtttttcttttcaccagtgagacgggcaacagctgattgcccttcaccgcctggccctgagagagttgcagcaagcggtccacgctggtttgccccagcaggcgaaaatcctgtttgatggtggttaacggcgggatataacatgagctgtcttcggtatcgtcgtatcccactaccgagatgtccgcaccaacgcgcagcccggactcggtaatggcgcgcattgcgcccagcgccatctgatcgttggcaaccagcatcgcagtgggaacgatgccctcattcagcatttgcatggtttgttgaaaaccggacatggcactccagtcgccttcccgttccgctatcggctgaatttgattgcgagtgagatatttatgccagccagccagacgcagacgcgccgagacagaacttaatgggcccgctaacagcgcgatttgctggtgacccaatgcgaccagatgctccacgcccagtcgcgtaccgtcttcatgggagaaaataatactgttgatgggtgtctggtcagagacatcaagaaataacgccggaacattagtgcaggcagcttccacagcaatggcatcctggtcatccagcggatagttaatgatcagcccactgacgcgttgcgcgagaagattgtgcaccgccgctttacaggcttcgacgccgcttcgttctaccatcgacaccaccacgctggcacccagttgatcggcgcgagatttaatcgccgcgacaatttgcgacggcgcgtgcagggccagactggaggtggcaacgccaatcagcaacgactgtttgcccgccagttgttgtgccacgcggttgggaatgtaattcagctccgccatcgccgcttccactttttcccgcgttttcgcagaaacgtggctggcctggttcaccacgcgggaaacggtctgataagagacaccggcatactctgcgacatcgtataacgttactggtttcac

SEQ ID NO: 247 - DNA, 8497 bp, Artificial Sequence
  Synthetic
attcaccaccctgaattgactctcttccgggcgctatcatgccataccgcgaaaggttttgcgccattcgatggtgtccgggatctcgacgctctcccttatgcgactcctgcattaggaaattaatacgactcactataggggaattgtgagcggataacaattcccctgtagaaataattttgtttaactttaataaggagatataccatgggtgaactgccgagtaggtagctgataacagtacagcgcggctgaaatcatcattaaagcggtgaactgccgagtaggtagctgataacggatccgaattcgagctcggcgcgcctgcaggtcgacaagcttgcggccgcataatgcttaagtcgaacagaaagtaatcgtattgtacacggccgcataatcgaaattaatacgactcactataggggaattgtgagcggataacaattccccatcttagtatattagttaagtataagaaggagatatacatatgtttttgcaaagacctaaaccttacagcgatgaaagtttagaaagtttctttatccgagtggctaacaaaaatggctacggtgatgtccatcgcttcctagaagccactaaacgattccttcaagacattgaccataatggctatcaaacctttccgactgatataactcggataaacccatactcagctaaaaacagttccagcgcacgaactgcgtcattcctgaaacttgcacaattgacatttaatgaaccgccagagctacttgggttggcaattaacagaacaaacatgaaatactcgccgtcaactagcgcggttgttagaggtgcagaagtctttcctcgcagtttactacggacgcactccatcccctgctgtcctttgtgtctgcgagaaaatggctacgcctcctacctttggcactttcaggggtacgaatactgccacagccataacgtacctttaattaccacttgtagctgtggtaaggagtttgactaccgagtatctgggttaaagggcatttgctgcaaatgcaaggagcctatcaccttaaccagcagggagaacggtcatgaggcagcgtgtactgtttcaaactggcttgctggccatgaatctaaacctctgccaaatcttcctaaaagctaccgatggggtttagttcattggtggatgggtattaaagatagcgagttcgatcacttttcgttcgttcaatttttctcaaactggccaaggtcattccactcgataatcgaagatgaagtagagttcaaccttgagcatgctgttgtcagcacgtctgaattacgactaaaagatcttcttggtcgattgtttttcggttcaattcggttacctgagcggaatcttcaacacaatatcatccttggtgagcttctctgctatttagaaaatcgtttatggcaagacaagggattaatcgccaacctcaaaatgaacgcgttagaggcgactgtaatgttaaattgtagcctcgatcagattgcatcaatggttgaacaacgcatcttgaagccaaatcgaaaaagcaagcccaacagccctcttgatgttaccgattatctatttcatttcggcgatattttctgtctttggttagctgagttccaaagcgatgagtttaaccgttcgttttatgtgtcgaggtggtaaaaggaggtaaataatgcctggacctaagaaaaagcgtaaagttggtaccggtatgcaaactctgaaagaactaatcgcatccaatcctgacgacttaacaactgaacttaagagagcatttcgtccactcacaccgcatattgcaattgatggtaatgaacttgacgcactgacgatattagtcaatttaaccgataagactgatgatcagaaagacctgctcgatcgagccaaatgcaagcaaaaacttcgagatgaaaaatggtgggctagctgcataaattgcgttaattacagacaaagccataacccaaaattcccggatatacgttctgaaggcgtgattcgaacccaagccctgggtgaattaccgagtttcctactctcgtcctcaaaaatcccaccataccattggtcatatagccatgattcaaaatacgtcaacaaaagcgcattcctcaccaatgagttttgttgggatggtgagatctcatgtttgggtgagcttcttaaagatgcagatcacccactttggaatactttgaaaaagttaggttgttctcaaaaaacttgcaaagcaatggcaaaacaactagctgatattactctcacgactatcaatgtcacactcgcaccaaattacctgactcaaatatctctccccgatagtgatacatcctacatttcactctctcctgttgcatcgctatcgatgcaaagccactttcatcagaggctccaagatgaaaatcggcatagcgcgataacgcggtttagccgaactaccaacatgggggtcactgcgatgacatgtggcggcgcatttagaatgttaaagtctggcgctaagttttccagcccccctcatcaccgattaaacagtaaacgaagttggttgacgtcagagcatgttcagtcattaaaacagtaccagcgcctcaacaaaagcctcatacctgaaaactctcggattgcactccgtagaaaatacaaaatcgagcttcaaaatatggtcagatcttggtttgcaatgcaagaccatacccttgattcgaacatacttatccaacatttgaatcatgacctatcttacttaggagccacaaaacgttttgcatacgatccagcgatgaccaagctctttactgagcttttgaaacgagagttatcaaattcaatcaataatggtgagcaacacactaatggatcgtttttagtcctaccgaatatcagggtttgtggcgcaacagctttaagctccccggtaacggtggggattccatcacttacagctttctttggcttcgttcacgcatttgaacggaatataaatcgcaccacctcatcgtttcgtgttgaatcctttgcgatatgcgtccatcaactacatgtcgagaagcgaggtttgacagcagagtttgtggaaaaaggcgacgggactatatccgctcccgcgacccgggatgactggcagtgtgatgtcgtatttagccttattttgaacaccaactttgctcaacatattgaccaagatacgttagttacatcactaccaaagcgattggctcggggttcagcaaaaattgcgattgatgactttaaacatatcaactcattctcgacattagaaacagcgatcgaatctctgccaatagaagctggtaggtggttatcactttacgcacagtcaaacaataatctaagtgatctattagcagccatgacagaggaccatcagctcatggcaagctgcgtcggttaccacttgttagaagagcccaaagataaaccaaactccctcagaggttacaaacacgctatcgccgagtgcatcattggactcattaactcaatcacctttagctcagagactgatcccaacacaatcttttggtcgctaaagaactatcaaaactacctagtggtacagccaaggagtatcaacgatgaaactaccgacaaatctagcctatgagcgctctatcgacccatcagatgtctgtttttttgtcgtctggcccgatgatagaaaaacacctttaacctacaattctcgtactctgctcgggcaaatggaagcggcatcattagcctatgatgtctcaggtcaaccaataaaaagtgccaccgctgaggcgttagctcaagggaaccctcatcaagttgatttctgccacgttccatacggtgcgagtcatattgaatgcagtttctccgtctcgttttcttctgaactacgtcaaccatataagtgtaactcaagcaaagttaaacaaacgctagtgcaattagtcgagctctacgaaacgaaaatcggctggactgagctagcaacccgatatttgatgaacatttgcaacggtaaatggctgtggaaaaatacccgtaaagcctattgctggaacattgtacttacaccttggccttggaacggggaaaaggttggatttgaagatattcgtactaactacacctcacggcaagactttaaaaataataaaaattggtctgctatagttgaaatgatcaaaaccgcattttctagtactgatgggctggcgatatttgaagtcagggccaccttgcacttgccaacgaatgctatggtgcggccaagccaagttttcacagaaaaagaaagtggcagtaaaagtaaatctaaaactcaaaacagtcgagtttttcagagtacaactattgatggtgaacgatcgccaatactaggggcctttaaaacgggagcagctattgcaaccattgacgactggtatcctgaagccactgagccactaagggtcggacggtttggggttcatcgcgaagatgtcacttgctaccgtcatccgtctaccggaaaagattttttctcgatattacaacaagcagagcactatattgaagtgttgagcgccaacaaaactcccgctcaagaaactatcaacgacatgcactttttaatggctaacctgattaagggtgggatgttccagcataaaggagactgactgtgaaatggtattataagacaatcacctttctgccagagttgtgcaacaacgagtcactggctgcaaagtgtctccgcgttctgcatggatttaactatcagtatgagacacgaaatatcggcgtttcatttccgctttggtgtgatgcaacggttggaaaaaagatttcatttgtcagcaagaacaagatagaactcgacttactacttaaacaacactatttcgtccaaatggaacaacttcaatactttcatatatccaacactgttctcgtcccagaagattgtacatacgtttcctttagacgctgtcaatctatagataagctcacagcagcagggctggcaaggaaaatcagacgcctggagaaacgtgctctatctagaggcgagcaatttgacccatcatcttttgctcaaaaagagcatactgcaatagcgcactaccactcacttggggagtccagcaaacagacgaaccgcaactttcgactcaatatcaggatgctctcggagcaaccccgtgaggggaactcgatttttagtagctatggcttatcaaattcagaaaactcgtttcagcctgtacccttaatctgacctaggctgctgccaccgctgagcaataactagcataaccccttggggcctctaaacgggtcttgaggggttttttgctgaaacctcaggcatttgagaagcacacggtcacactgcttccggtagtcaataaaccggtaaaccagcaatagacataagcggctatttaacgaccctgccctgaaccgacgaccgggtcatcgtggccggatcttgcggcccctcggcttgaacgaattgttagacattatttgccgactaccttggtgatctcgcctttcacgtagtggacaaattcttccaactgatctgcgcgcgaggccaagcgatcttcttcttgtccaagataagcctgtctagcttcaagtatgacgggctgatactgggccggcaggcgctccattgcccagtcggcagcgacatccttcggcgcgattttgccggttactgcgctgtaccaaatgcgggacaacgtaagcactacatttcgctcatcgccagcccagtcgggcggcgagttccatagcgttaaggtttcatttagcgcctcaaatagatcctgttcaggaaccggatcaaagagttcctccgccgctggacctaccaaggcaacgctatgttctcttgcttttgtcagcaagatagccagatcaatgtcgatcgtggctggctcgaagatacctgcaagaatgtcattgcgctgccattctccaaattgcagttcgcgcttagctggataacgccacggaatgatgtcgtcgtgcacaacaatggtgacttctacagcgcggagaatctcgctctctccaggggaagccgaagtttccaaaaggtcgttgatcaaagctcgccgcgttgtttcatcaagccttacggtcaccgtaaccagcaaatcaatatcactgtgtggcttcaggccgccatccactgcggagccgtacaaatgtacggccagcaacgtcggttcgagatggcgctcgatgacgccaactacctctgatagttgagtcgatacttcggcgatcaccgcttccctcatactcttcctttttcaatattattgaagcatttatcagggttattgtctcatgagcggatacatatttgaatgtatttagaaaaataaacaaatagctagctcactcggtcgctacgctccgggcgtgagactgcggcgggcgctgcggacacatacaaagttacccacagattccgtggataagcaggggactaacatgtgaggcaaaacagcagggccgcgccggtggcgtttttccataggctccgccctcctgccagagttcacataaacagacgcttttccggtgcatctgtgggagccgtgaggctcaaccatgaatctgacagtacgggcgaaacccgacaggacttaaagatccccaccgtttccggcgggtcgctccctcttgcgctctcctgttccgaccctgccgtttaccggatacctgttccgcctttctcccttacgggaagtgtggcgctttctcatagctcacacactggtatctcggctcggtgtaggtcgttcgctccaagctgggctgtaagcaagaactccccgttcagcccgactgctgcgccttatccggtaactgttcacttgagtccaacccggaaaagcacggtaaaacgccactggcagcagccattggtaactgggagttcgcagaggatttgtttagctaaacacgcggttgctcttgaagtgtgcgccaaagtccggctacactggaaggacagatttggttgctgtgctctgcgaaagccagttaccacggttaagcagttccccaactgacttaaccttcgatcaaaccacctccccaggtggttttttcgtttacagggcaaaagattacgcgcagaaaaaaaggatctcaagaagatcctttgatcttttctactgaaccgctctagatttcagtgcaatttatctcttcaaatgtagcacctgaagtcagccccatacgatataagttgtaattctcatgttagtcatgccccgcgcccaccggaaggagctgactgggttgaaggctctcaagggcatcggtcgagatcccggtgcctaatgagtgagctaacttacattaattgcgttgcgctcactgcccgctttccagtcgggaaacctgtcgtgccagctgcattaatgaatcggccaacgcgcggggagaggcggtttgcgtattgggcgccagggtggtttttcttttcaccagtgagacgggcaacagctgattgcccttcaccgcctggccctgagagagttgcagcaagcggtccacgctggtttgccccagcaggcgaaaatcctgtttgatggtggttaacggcgggatataacatgagctgtcttcggtatcgtcgtatcccactaccgagatgtccgcaccaacgcgcagcccggactcggtaatggcgcgcattgcgcccagcgccatctgatcgttggcaaccagcatcgcagtgggaacgatgccctcattcagcatttgcatggtttgttgaaaaccggacatggcactccagtcgccttcccgttccgctatcggctgaatttgattgcgagtgagatatttatgccagccagccagacgcagacgcgccgagacagaacttaatgggcccgctaacagcgcgatttgctggtgacccaatgcgaccagatgctccacgcccagtcgcgtaccgtcttcatgggagaaaataatactgttgatgggtgtctggtcagagacatcaagaaataacgccggaacattagtgcaggcagcttccacagcaatggcatcctggtcatccagcggatagttaatgatcagcccactgacgcgttgcgcgagaagattgtgcaccgccgctttacaggcttcgacgccgcttcgttctaccatcgacaccaccacgctggcacccagttgatcggcgcgagatttaatcgccgcgacaatttgcgacggcgcgtgcagggccagactggaggtggcaacgccaatcagcaacgactgtttgcccgccagttgttgtgccacgcggttgggaatgtaattcagctccgccatcgccgcttccactttttcccgcgttttcgcagaaacgtggctggcctggttcaccacgcgggaaacggtctgataagagacaccggcatactctgcgacatcgtataacgttactggtttcac

SEQ ID NO: 248 - DNA, 8548 bp, Artificial Sequence
  Synthetic
attcaccaccctgaattgactctcttccgggcgctatcatgccataccgcgaaaggttttgcgccattcgatggtgtccgggatctcgacgctctcccttatgcgactcctgcattaggaaattaatacgactcactataggggaattgtgagcggataacaattcccctgtagaaataattttgtttaactttaataaggagatataccatgggtgaactgccgagtaggtagctgataacagtacagcgcggctgaaatcatcattaaagcggtgaactgccgagtaggtagctgataacggatccgaattcgagctcggcgcgcctgcaggtcgacaagcttgcggccgcataatgcttaagtcgaacagaaagtaatcgtattgtacacggccgcataatcgaaattaatacgactcactataggggaattgtgagcggataacaattccccatcttagtatattagttaagtataagaaggagatatacatatgtttttgcaaagacctaaaccttacagcgatgaaagtttagaaagtttctttatccgagtggctaacaaaaatggctacggtgatgtccatcgcttcctagaagccactaaacgattccttcaagacattgaccataatggctatcaaacctttccgactgatataactcggataaacccatactcagctaaaaacagttccagcgcacgaactgcgtcattcctgaaacttgcacaattgacatttaatgaaccgccagagctacttgggttggcaattaacagaacaaacatgaaatactcgccgtcaactagcgcggttgttagaggtgcagaagtctttcctcgcagtttactacggacgcactccatcccctgctgtcctttgtgtctgcgagaaaatggctacgcctcctacctttggcactttcaggggtacgaatactgccacagccataacgtacctttaattaccacttgtagctgtggtaaggagtttgactaccgagtatctgggttaaagggcatttgctgcaaatgcaaggagcctatcaccttaaccagcagggagaacggtcatgaggcagcgtgtactgtttcaaactggcttgctggccatgaatctaaacctctgccaaatcttcctaaaagctaccgatggggtttagttcattggtggatgggtattaaagatagcgagttcgatcacttttcgttcgttcaatttttctcaaactggccaaggtcattccactcgataatcgaagatgaagtagagttcaaccttgagcatgctgttgtcagcacgtctgaattacgactaaaagatcttcttggtcgattgtttttcggttcaattcggttacctgagcggaatcttcaacacaatatcatccttggtgagcttctctgctatttagaaaatcgtttatggcaagacaagggattaatcgccaacctcaaaatgaacgcgttagaggcgactgtaatgttaaattgtagcctcgatcagattgcatcaatggttgaacaacgcatcttgaagccaaatcgaaaaagcaagcccaacagccctcttgatgttaccgattatctatttcatttcggcgatattttctgtctttggttagctgagttccaaagcgatgagtttaaccgttcgttttatgtgtcgaggtggtaaatgcaaactctgaaagaactaatcgcatccaatcctgacgacttaacaactgaacttaagagagcatttcgtccactcacaccgcatattgcaattgatggtaatgaacttgacgcactgacgatattagtcaatttaaccgataagactgatgatcagaaagacctgctcgatcgagccaaatgcaagcaaaaacttcgagatgaaaaatggtgggctagctgcataaattgcgttaattacagacaaagccataacccaaaattcccggatatacgttctgaaggcgtgattcgaacccaagccctgggtgaattaccgagtttcctactctcgtcctcaaaaatcccaccataccattggtcatatagccatgattcaaaatacgtcaacaaaagcgcattcctcaccaatgagttttgttgggatggtgagatctcatgtttgggtgagcttcttaaagatgcagatcacccactttggaatactttgaaaaagttaggttgttctcaaaaaacttgcaaagcaatggcaaaacaactagctgatattactctcacgactatcaatgtcacactcgcaccaaattacctgactcaaatatctctccccgatagtgatacatcctacatttcactctctcctgttgcatcgctatcgatgcaaagccactttcatcagaggctccaagatgaaaatcggcatagcgcgataacgcggtttagccgaactaccaacatgggggtcactgcgatgacatgtggcggcgcatttagaatgttaaagtctggcgctaagttttccagcccccctcatcaccgattaaacagtaaacgaagttggttgacgtcagagcatgttcagtcattaaaacagtaccagcgcctcaacaaaagcctcatacctgaaaactctcggattgcactccgtagaaaatacaaaatcgagcttcaaaatatggtcagatcttggtttgcaatgcaagaccatacccttgattcgaacatacttatccaacatttgaatcatgacctatcttacttaggagccacaaaacgttttgcatacgatccagcgatgaccaagctctttactgagcttttgaaacgagagttatcaaattcaatcaataatggtgagcaacacactaatggatcgtttttagtcctaccgaatatcagggtttgtggcgcaacagctttaagctccccggtaacggtggggattccatcacttacagctttctttggcttcgttcacgcatttgaacggaatataaatcgcaccacctcatcgtttcgtgttgaatcctttgcgatatgcgtccatcaactacatgtcgagaagcgaggtttgacagcagagtttgtggaaaaaggcgacgggactatatccgctcccgcgacccgggatgactggcagtgtgatgtcgtatttagccttattttgaacaccaactttgctcaacatattgaccaagatacgttagttacatcactaccaaagcgattggctcggggttcagcaaaaattgcgattgatgactttaaacatatcaactcattctcgacattagaaacagcgatcgaatctctgccaatagaagctggtaggtggttatcactttacgcacagtcaaacaataatctaagtgatctattagcagccatgacagaggaccatcagctcatggcaagctgcgtcggttaccacttgttagaagagcccaaagataaaccaaactccctcagaggttacaaacacgctatcgccgagtgcatcattggactcattaactcaatcacctttagctcagagactgatcccaacacaatcttttggtcgctaaagaactatcaaaactacctagtggtacagccaaggagtatcaacgatgaaaccacagataagtcctcattagggtcctcggagggtcgtggcagtcttttgacttgcggtgatgtagaagagaaccctggctaagaaggaggtaaataatgaaactaccgacaaatctagcctatgagcgctctatcgacccatcagatgtctgtttttttgtcgtctggcccgatgatagaaaaacacctttaacctacaattctcgtactctgctcgggcaaatggaagcggcatcattagcctatgatgtctcaggtcaaccaataaaaagtgccaccgctgaggcgttagctcaagggaaccctcatcaagttgatttctgccacgttccatacggtgcgagtcatattgaatgcagtttctccgtctcgttttcttctgaactacgtcaaccatataagtgtaactcaagcaaagttaaacaaacgctagtgcaattagtcgagctctacgaaacgaaaatcggctggactgagctagcaacccgatatttgatgaacatttgcaacggtaaatggctgtggaaaaatacccgtaaagcctattgctggaacattgtacttacaccttggccttggaacggggaaaaggttggatttgaagatattcgtactaactacacctcacggcaagactttaaaaataataaaaattggtctgctatagttgaaatgatcaaaaccgcattttctagtactgatgggctggcgatatttgaagtcagggccaccttgcacttgccaacgaatgctatggtgcggccaagccaagttttcacagaaaaagaaagtggcagtaaaagtaaatctaaaactcaaaacagtcgagtttttcagagtacaactattgatggtgaacgatcgccaatactaggggcctttaaaacgggagcagctattgcaaccattgacgactggtatcctgaagccactgagccactaagggtcggacggtttggggttcatcgcgaagatgtcacttgctaccgtcatccgtctaccggaaaagattttttctcgatattacaacaagcagagcactatattgaagtgttgagcgccaacaaaactcccgctcaagaaactatcaacgacatgcactttttaatggctaacctgattaagggtgggatgttccagcataaaggagactgactgtgaaatggtattataagacaatcacctttctgccagagttgtgcaacaacgagtcactggctgcaaagtgtctccgcgttctgcatggatttaactatcagtatgagacacgaaatatcggcgtttcatttccgctttggtgtgatgcaacggttggaaaaaagatttcatttgtcagcaagaacaagatagaactcgacttactacttaaacaacactatttcgtccaaatggaacaacttcaatactttcatatatccaacactgttctcgtcccagaagattgtacatacgtttcctttagacgctgtcaatctatagataagctcacagcagcagggctggcaaggaaaatcagacgcctggagaaacgtgctctatctagaggcgagcaatttgacccatcatcttttgctcaaaaagagcatactgcaatagcgcactaccactcacttggggagtccagcaaacagacgaaccgcaactttcgactcaatatcaggatgctctcggagcaaccccgtgaggggaactcgatttttagtagctatggcttatcaaattcagaaaactcgtttcagcctgtacccttaatctgacctaggctgctgccaccgctgagcaataactagcataaccccttggggcctctaaacgggtcttgaggggttttttgctgaaacctcaggcatttgagaagcacacggtcacactgcttccggtagtcaataaaccggtaaaccagcaatagacataagcggctatttaacgaccctgccctgaaccgacgaccgggtcatcgtggccggatcttgcggcccctcggcttgaacgaattgttagacattatttgccgactaccttggtgatctcgcctttcacgtagtggacaaattcttccaactgatctgcgcgcgaggccaagcgatcttcttcttgtccaagataagcctgtctagcttcaagtatgacgggctgatactgggccggcaggcgctccattgcccagtcggcagcgacatccttcggcgcgattttgccggttactgcgctgtaccaaatgcgggacaacgtaagcactacatttcgctcatcgccagcccagtcgggcggcgagttccatagcgttaaggtttcatttagcgcctcaaatagatcctgttcaggaaccggatcaaagagttcctccgccgctggacctaccaaggcaacgctatgttctcttgcttttgtcagcaagatagccagatcaatgtcgatcgtggctggctcgaagatacctgcaagaatgtcattgcgctgccattctccaaattgcagttcgcgcttagctggataacgccacggaatgatgtcgtcgtgcacaacaatggtgacttctacagcgcggagaatctcgctctctccaggggaagccgaagtttccaaaaggtcgttgatcaaagctcgccgcgttgtttcatcaagccttacggtcaccgtaaccagcaaatcaatatcactgtgtggcttcaggccgccatccactgcggagccgtacaaatgtacggccagcaacgtcggttcgagatggcgctcgatgacgccaactacctctgatagttgagtcgatacttcggcgatcaccgcttccctcatactcttcctttttcaatattattgaagcatttatcagggttattgtctcatgagcggatacatatttgaatgtatttagaaaaataaacaaatagctagctcactcggtcgctacgctccgggcgtgagactgcggcgggcgctgcggacacatacaaagttacccacagattccgtggataagcaggggactaacatgtgaggcaaaacagcagggccgcgccggtggcgtttttccataggctccgccctcctgccagagttcacataaacagacgcttttccggtgcatctgtgggagccgtgaggctcaaccatgaatctgacagtacgggcgaaacccgacaggacttaaagatccccaccgtttccggcgggtcgctccctcttgcgctctcctgttccgaccctgccgtttaccggatacctgttccgcctttctcccttacgggaagtgtggcgctttctcatagctcacacactggtatctcggctcggtgtaggtcgttcgctccaagctgggctgtaagcaagaactccccgttcagcccgactgctgcgccttatccggtaactgttcacttgagtccaacccggaaaagcacggtaaaacgccactggcagcagccattggtaactgggagttcgcagaggatttgtttagctaaacacgcggttgctcttgaagtgtgcgccaaagtccggctacactggaaggacagatttggttgctgtgctctgcgaaagccagttaccacggttaagcagttccccaactgacttaaccttcgatcaaaccacctccccaggtggttttttcgtttacagggcaaaagattacgcgcagaaaaaaaggatctcaagaagatcctttgatcttttctactgaaccgctctagatttcagtgcaatttatctcttcaaatgtagcacctgaagtcagccccatacgatataagttgtaattctcatgttagtcatgccccgcgcccaccggaaggagctgactgggttgaaggctctcaagggcatcggtcgagatcccggtgcctaatgagtgagctaacttacattaattgcgttgcgctcactgcccgctttccagtcgggaaacctgtcgtgccagctgcattaatgaatcggccaacgcgcggggagaggcggtttgcgtattgggcgccagggtggtttttcttttcaccagtgagacgggcaacagctgattgcccttcaccgcctggccctgagagagttgcagcaagcggtccacgctggtttgccccagcaggcgaaaatcctgtttgatggtggttaacggcgggatataacatgagctgtcttcggtatcgtcgtatcccactaccgagatgtccgcaccaacgcgcagcccggactcggtaatggcgcgcattgcgcccagcgccatctgatcgttggcaaccagcatcgcagtgggaacgatgccctcattcagcatttgcatggtttgttgaaaaccggacatggcactccagtcgccttcccgttccgctatcggctgaatttgattgcgagtgagatatttatgccagccagccagacgcagacgcgccgagacagaacttaatgggcccgctaacagcgcgatttgctggtgacccaatgcgaccagatgctccacgcccagtcgcgtaccgtcttcatgggagaaaataatactgttgatgggtgtctggtcagagacatcaagaaataacgccggaacattagtgcaggcagcttccacagcaatggcatcctggtcatccagcggatagttaatgatcagcccactgacgcgttgcgcgagaagattgtgcaccgccgctttacaggcttcgacgccgcttcgttctaccatcgacaccaccacgctggcacccagttgatcggcgcgagatttaatcgccgcgacaatttgcgacggcgcgtgcagggccagactggaggtggcaacgccaatcagcaacgactgtttgcccgccagttgttgtgccacgcggttgggaatgtaattcagctccgccatcgccgcttccactttttcccgcgttttcgcagaaacgtggctggcctggttcaccacgcgggaaacggtctgataagagacaccggcatactctgcgacatcgtataacgttactggtttcac

SEQ ID NO: 249 - DNA, 8524 bp, Artificial Sequence
  Synthetic
attcaccaccctgaattgactctcttccgggcgctatcatgccataccgcgaaaggttttgcgccattcgatggtgtccgggatctcgacgctctcccttatgcgactcctgcattaggaaattaatacgactcactataggggaattgtgagcggataacaattcccctgtagaaataattttgtttaactttaataaggagatataccatgggtgaactgccgagtaggtagctgataacagtacagcgcggctgaaatcatcattaaagcggtgaactgccgagtaggtagctgataacggatccgaattcgagctcggcgcgcctgcaggtcgacaagcttgcggccgcataatgcttaagtcgaacagaaagtaatcgtattgtacacggccgcataatcgaaattaatacgactcactataggggaattgtgagcggataacaattccccatcttagtatattagttaagtataagaaggagatatacatatgtttttgcaaagacctaaaccttacagcgatgaaagtttagaaagtttctttatccgagtggctaacaaaaatggctacggtgatgtccatcgcttcctagaagccactaaacgattccttcaagacattgaccataatggctatcaaacctttccgactgatataactcggataaacccatactcagctaaaaacagttccagcgcacgaactgcgtcattcctgaaacttgcacaattgacatttaatgaaccgccagagctacttgggttggcaattaacagaacaaacatgaaatactcgccgtcaactagcgcggttgttagaggtgcagaagtctttcctcgcagtttactacggacgcactccatcccctgctgtcctttgtgtctgcgagaaaatggctacgcctcctacctttggcactttcaggggtacgaatactgccacagccataacgtacctttaattaccacttgtagctgtggtaaggagtttgactaccgagtatctgggttaaagggcatttgctgcaaatgcaaggagcctatcaccttaaccagcagggagaacggtcatgaggcagcgtgtactgtttcaaactggcttgctggccatgaatctaaacctctgccaaatcttcctaaaagctaccgatggggtttagttcattggtggatgggtattaaagatagcgagttcgatcacttttcgttcgttcaatttttctcaaactggccaaggtcattccactcgataatcgaagatgaagtagagttcaaccttgagcatgctgttgtcagcacgtctgaattacgactaaaagatcttcttggtcgattgtttttcggttcaattcggttacctgagcggaatcttcaacacaatatcatccttggtgagcttctctgctatttagaaaatcgtttatggcaagacaagggattaatcgccaacctcaaaatgaacgcgttagaggcgactgtaatgttaaattgtagcctcgatcagattgcatcaatggttgaacaacgcatcttgaagccaaatcgaaaaagcaagcccaacagccctcttgatgttaccgattatctatttcatttcggcgatattttctgtctttggttagctgagttccaaagcgatgagtttaaccgttcgttttatgtgtcgaggtggtaaatgcaaactctgaaagaactaatcgcatccaatcctgacgacttaacaactgaacttaagagagcatttcgtccactcacaccgcatattgcaattgatggtaatgaacttgacgcactgacgatattagtcaatttaaccgataagactgatgatcagaaagacctgctcgatcgagccaaatgcaagcaaaaacttcgagatgaaaaatggtgggctagctgcataaattgcgttaattacagacaaagccataacccaaaattcccggatatacgttctgaaggcgtgattcgaacccaagccctgggtgaattaccgagtttcctactctcgtcctcaaaaatcccaccataccattggtcatatagccatgattcaaaatacgtcaacaaaagcgcattcctcaccaatgagttttgttgggatggtgagatctcatgtttgggtgagcttcttaaagatgcagatcacccactttggaatactttgaaaaagttaggttgttctcaaaaaacttgcaaagcaatggcaaaacaactagctgatattactctcacgactatcaatgtcacactcgcaccaaattacctgactcaaatatctctccccgatagtgatacatcctacatttcactctctcctgttgcatcgctatcgatgcaaagccactttcatcagaggctccaagatgaaaatcggcatagcgcgataacgcggtttagccgaactaccaacatgggggtcactgcgatgacatgtggcggcgcatttagaatgttaaagtctggcgctaagttttccagcccccctcatcaccgattaaacagtaaacgaagttggttgacgtcagagcatgttcagtcattaaaacagtaccagcgcctcaacaaaagcctcatacctgaaaactctcggattgcactccgtagaaaatacaaaatcgagcttcaaaatatggtcagatcttggtttgcaatgcaagaccatacccttgattcgaacatacttatccaacatttgaatcatgacctatcttacttaggagccacaaaacgttttgcatacgatccagcgatgaccaagctctttactgagcttttgaaacgagagttatcaaattcaatcaataatggtgagcaacacactaatggatcgtttttagtcctaccgaatatcagggtttgtggcgcaacagctttaagctccccggtaacggtggggattccatcacttacagctttctttggcttcgttcacgcatttgaacggaatataaatcgcaccacctcatcgtttcgtgttgaatcctttgcgatatgcgtccatcaactacatgtcgagaagcgaggtttgacagcagagtttgtggaaaaaggcgacgggactatatccgctcccgcgacccgggatgactggcagtgtgatgtcgtatttagccttattttgaacaccaactttgctcaacatattgaccaagatacgttagttacatcactaccaaagcgattggctcggggttcagcaaaaattgcgattgatgactttaaacatatcaactcattctcgacattagaaacagcgatcgaatctctgccaatagaagctggtaggtggttatcactttacgcacagtcaaacaataatctaagtgatctattagcagccatgacagaggaccatcagctcatggcaagctgcgtcggttaccacttgttagaagagcccaaagataaaccaaactccctcagaggttacaaacacgctatcgccgagtgcatcattggactcattaactcaatcacctttagctcagagactgatcccaacacaatcttttggtcgctaaagaactatcaaaactacctagtggtacagccaaggagtatcaacgatgaaaccacagataagtcctcattataagaaggaggtaaataatgggacctaagaaaaagcgtaaagttggttctgccatgaaactaccgacaaatctagcctatgagcgctctatcgacccatcagatgtctgtttttttgtcgtctggcccgatgatagaaaaacacctttaacctacaattctcgtactctgctcgggcaaatggaagcggcatcattagcctatgatgtctcaggtcaaccaataaaaagtgccaccgctgaggcgttagctcaagggaaccctcatcaagttgatttctgccacgttccatacggtgcgagtcatattgaatgcagtttctccgtctcgttttcttctgaactacgtcaaccatataagtgtaactcaagcaaagttaaacaaacgctagtgcaattagtcgagctctacgaaacgaaaatcggctggactgagctagcaacccgatatttgatgaacatttgcaacggtaaatggctgtggaaaaatacccgtaaagcctattgctggaacattgtacttacaccttggccttggaacggggaaaaggttggatttgaagatattcgtactaactacacctcacggcaagactttaaaaataataaaaattggtctgctatagttgaaatgatcaaaaccgcattttctagtactgatgggctggcgatatttgaagtcagggccaccttgcacttgccaacgaatgctatggtgcggccaagccaagttttcacagaaaaagaaagtggcagtaaaagtaaatctaaaactcaaaacagtcgagtttttcagagtacaactattgatggtgaacgatcgccaatactaggggcctttaaaacgggagcagctattgcaaccattgacgactggtatcctgaagccactgagccactaagggtcggacggtttggggttcatcgcgaagatgtcacttgctaccgtcatccgtctaccggaaaagattttttctcgatattacaacaagcagagcactatattgaagtgttgagcgccaacaaaactcccgctcaagaaactatcaacgacatgcactttttaatggctaacctgattaagggtgggatgttccagcataaaggagactgactgtgaaatggtattataagacaatcacctttctgccagagttgtgcaacaacgagtcactggctgcaaagtgtctccgcgttctgcatggatttaactatcagtatgagacacgaaatatcggcgtttcatttccgctttggtgtgatgcaacggttggaaaaaagatttcatttgtcagcaagaacaagatagaactcgacttactacttaaacaacactatttcgtccaaatggaacaacttcaatactttcatatatccaacactgttctcgtcccagaagattgtacatacgtttcctttagacgctgtcaatctatagataagctcacagcagcagggctggcaaggaaaatcagacgcctggagaaacgtgctctatctagaggcgagcaatttgacccatcatcttttgctcaaaaagagcatactgcaatagcgcactaccactcacttggggagtccagcaaacagacgaaccgcaactttcgactcaatatcaggatgctctcggagcaaccccgtgaggggaactcgatttttagtagctatggcttatcaaattcagaaaactcgtttcagcctgtacccttaatctgacctaggctgctgccaccgctgagcaataactagcataaccccttggggcctctaaacgggtcttgaggggttttttgctgaaacctcaggcatttgagaagcacacggtcacactgcttccggtagtcaataaaccggtaaaccagcaatagacataagcggctatttaacgaccctgccctgaaccgacgaccgggtcatcgtggccggatcttgcggcccctcggcttgaacgaattgttagacattatttgccgactaccttggtgatctcgcctttcacgtagtggacaaattcttccaactgatctgcgcgcgaggccaagcgatcttcttcttgtccaagataagcctgtctagcttcaagtatgacgggctgatactgggccggcaggcgctccattgcccagtcggcagcgacatccttcggcgcgattttgccggttactgcgctgtaccaaatgcgggacaacgtaagcactacatttcgctcatcgccagcccagtcgggcggcgagttccatagcgttaaggtttcatttagcgcctcaaatagatcctgttcaggaaccggatcaaagagttcctccgccgctggacctaccaaggcaacgctatgttctcttgcttttgtcagcaagatagccagatcaatgtcgatcgtggctggctcgaagatacctgcaagaatgtcattgcgctgccattctccaaattgcagttcgcgcttagctggataacgccacggaatgatgtcgtcgtgcacaacaatggtgacttctacagcgcggagaatctcgctctctccaggggaagccgaagtttccaaaaggtcgttgatcaaagctcgccgcgttgtttcatcaagccttacggtcaccgtaaccagcaaatcaatatcactgtgtggcttcaggccgccatccactgcggagccgtacaaatgtacggccagcaacgtcggttcgagatggcgctcgatgacgccaactacctctgatagttgagtcgatacttcggcgatcaccgcttccctcatactcttcctttttcaatattattgaagcatttatcagggttattgtctcatgagcggatacatatttgaatgtatttagaaaaataaacaaatagctagctcactcggtcgctacgctccgggcgtgagactgcggcgggcgctgcggacacatacaaagttacccacagattccgtggataagcaggggactaacatgtgaggcaaaacagcagggccgcgccggtggcgtttttccataggctccgccctcctgccagagttcacataaacagacgcttttccggtgcatctgtgggagccgtgaggctcaaccatgaatctgacagtacgggcgaaacccgacaggacttaaagatccccaccgtttccggcgggtcgctccctcttgcgctctcctgttccgaccctgccgtttaccggatacctgttccgcctttctcccttacgggaagtgtggcgctttctcatagctcacacactggtatctcggctcggtgtaggtcgttcgctccaagctgggctgtaagcaagaactccccgttcagcccgactgctgcgccttatccggtaactgttcacttgagtccaacccggaaaagcacggtaaaacgccactggcagcagccattggtaactgggagttcgcagaggatttgtttagctaaacacgcggttgctcttgaagtgtgcgccaaagtccggctacactggaaggacagatttggttgctgtgctctgcgaaagccagttaccacggttaagcagttccccaactgacttaaccttcgatcaaaccacctccccaggtggttttttcgtttacagggcaaaagattacgcgcagaaaaaaaggatctcaagaagatcctttgatcttttctactgaaccgctctagatttcagtgcaatttatctcttcaaatgtagcacctgaagtcagccccatacgatataagttgtaattctcatgttagtcatgccccgcgcccaccggaaggagctgactgggttgaaggctctcaagggcatcggtcgagatcccggtgcctaatgagtgagctaacttacattaattgcgttgcgctcactgcccgctttccagtcgggaaacctgtcgtgccagctgcattaatgaatcggccaacgcgcggggagaggcggtttgcgtattgggcgccagggtggtttttcttttcaccagtgagacgggcaacagctgattgcccttcaccgcctggccctgagagagttgcagcaagcggtccacgctggtttgccccagcaggcgaaaatcctgtttgatggtggttaacggcgggatataacatgagctgtcttcggtatcgtcgtatcccactaccgagatgtccgcaccaacgcgcagcccggactcggtaatggcgcgcattgcgcccagcgccatctgatcgttggcaaccagcatcgcagtgggaacgatgccctcattcagcatttgcatggtttgttgaaaaccggacatggcactccagtcgccttcccgttccgctatcggctgaatttgattgcgagtgagatatttatgccagccagccagacgcagacgcgccgagacagaacttaatgggcccgctaacagcgcgatttgctggtgacccaatgcgaccagatgctccacgcccagtcgcgtaccgtcttcatgggagaaaataatactgttgatgggtgtctggtcagagacatcaagaaataacgccggaacattagtgcaggcagcttccacagcaatggcatcctggtcatccagcggatagttaatgatcagcccactgacgcgttgcgcgagaagattgtgcaccgccgctttacaggcttcgacgccgcttcgttctaccatcgacaccaccacgctggcacccagttgatcggcgcgagatttaatcgccgcgacaatttgcgacggcgcgtgcagggccagactggaggtggcaacgccaatcagcaacgactgtttgcccgccagttgttgtgccacgcggttgggaatgtaattcagctccgccatcgccgcttccactttttcccgcgttttcgcagaaacgtggctggcctggttcaccacgcgggaaacggtctgataagagacaccggcatactctgcgacatcgtataacgttactggtttcac

SEQ ID NO: 250 - DNA, 8516 bp, Artificial Sequence
  Synthetic
attcaccaccctgaattgactctcttccgggcgctatcatgccataccgcgaaaggttttgcgccattcgatggtgtccgggatctcgacgctctcccttatgcgactcctgcattaggaaattaatacgactcactataggggaattgtgagcggataacaattcccctgtagaaataattttgtttaactttaataaggagatataccatgggtgaactgccgagtaggtagctgataacagtacagcgcggctgaaatcatcattaaagcggtgaactgccgagtaggtagctgataacggatccgaattcgagctcggcgcgcctgcaggtcgacaagcttgcggccgcataatgcttaagtcgaacagaaagtaatcgtattgtacacggccgcataatcgaaattaatacgactcactataggggaattgtgagcggataacaattccccatcttagtatattagttaagtataagaaggagatatacatatgtttttgcaaagacctaaaccttacagcgatgaaagtttagaaagtttctttatccgagtggctaacaaaaatggctacggtgatgtccatcgcttcctagaagccactaaacgattccttcaagacattgaccataatggctatcaaacctttccgactgatataactcggataaacccatactcagctaaaaacagttccagcgcacgaactgcgtcattcctgaaacttgcacaattgacatttaatgaaccgccagagctacttgggttggcaattaacagaacaaacatgaaatactcgccgtcaactagcgcggttgttagaggtgcagaagtctttcctcgcagtttactacggacgcactccatcccctgctgtcctttgtgtctgcgagaaaatggctacgcctcctacctttggcactttcaggggtacgaatactgccacagccataacgtacctttaattaccacttgtagctgtggtaaggagtttgactaccgagtatctgggttaaagggcatttgctgcaaatgcaaggagcctatcaccttaaccagcagggagaacggtcatgaggcagcgtgtactgtttcaaactggcttgctggccatgaatctaaacctctgccaaatcttcctaaaagctaccgatggggtttagttcattggtggatgggtattaaagatagcgagttcgatcacttttcgttcgttcaatttttctcaaactggccaaggtcattccactcgataatcgaagatgaagtagagttcaaccttgagcatgctgttgtcagcacgtctgaattacgactaaaagatcttcttggtcgattgtttttcggttcaattcggttacctgagcggaatcttcaacacaatatcatccttggtgagcttctctgctatttagaaaatcgtttatggcaagacaagggattaatcgccaacctcaaaatgaacgcgttagaggcgactgtaatgttaaattgtagcctcgatcagattgcatcaatggttgaacaacgcatcttgaagccaaatcgaaaaagcaagcccaacagccctcttgatgttaccgattatctatttcatttcggcgatattttctgtctttggttagctgagttccaaagcgatgagtttaaccgttcgttttatgtgtcgaggtggtaaatgcaaactctgaaagaactaatcgcatccaatcctgacgacttaacaactgaacttaagagagcatttcgtccactcacaccgcatattgcaattgatggtaatgaacttgacgcactgacgatattagtcaatttaaccgataagactgatgatcagaaagacctgctcgatcgagccaaatgcaagcaaaaacttcgagatgaaaaatggtgggctagctgcataaattgcgttaattacagacaaagccataacccaaaattcccggatatacgttctgaaggcgtgattcgaacccaagccctgggtgaattaccgagtttcctactctcgtcctcaaaaatcccaccataccattggtcatatagccatgattcaaaatacgtcaacaaaagcgcattcctcaccaatgagttttgttgggatggtgagatctcatgtttgggtgagcttcttaaagatgcagatcacccactttggaatactttgaaaaagttaggttgttctcaaaaaacttgcaaagcaatggcaaaacaactagctgatattactctcacgactatcaatgtcacactcgcaccaaattacctgactcaaatatctctccccgatagtgatacatcctacatttcactctctcctgttgcatcgctatcgatgcaaagccactttcatcagaggctccaagatgaaaatcggcatagcgcgataacgcggtttagccgaactaccaacatgggggtcactgcgatgacatgtggcggcgcatttagaatgttaaagtctggcgctaagttttccagcccccctcatcaccgattaaacagtaaacgaagttggttgacgtcagagcatgttcagtcattaaaacagtaccagcgcctcaacaaaagcctcatacctgaaaactctcggattgcactccgtagaaaatacaaaatcgagcttcaaaatatggtcagatcttggtttgcaatgcaagaccatacccttgattcgaacatacttatccaacatttgaatcatgacctatcttacttaggagccacaaaacgttttgcatacgatccagcgatgaccaagctctttactgagcttttgaaacgagagttatcaaattcaatcaataatggtgagcaacacactaatggatcgtttttagtcctaccgaatatcagggtttgtggcgcaacagctttaagctccccggtaacggtggggattccatcacttacagctttctttggcttcgttcacgcatttgaacggaatataaatcgcaccacctcatcgtttcgtgttgaatcctttgcgatatgcgtccatcaactacatgtcgagaagcgaggtttgacagcagagtttgtggaaaaaggcgacgggactatatccgctcccgcgacccgggatgactggcagtgtgatgtcgtatttagccttattttgaacaccaactttgctcaacatattgaccaagatacgttagttacatcactaccaaagcgattggctcggggttcagcaaaaattgcgattgatgactttaaacatatcaactcattctcgacattagaaacagcgatcgaatctctgccaatagaagctggtaggtggttatcactttacgcacagtcaaacaataatctaagtgatctattagcagccatgacagaggaccatcagctcatggcaagctgcgtcggttaccacttgttagaagagcccaaagataaaccaaactccctcagaggttacaaacacgctatcgccgagtgcatcattggactcattaactcaatcacctttagctcagagactgatcccaacacaatcttttggtcgctaaagaactatcaaaactacctagtggtacagccaaggagtatcaacgatgaaactaccgacaaatctagcctatgagcgctctatcgacccatcagatgtctgtttttttgtcgtctggcccgatgatagaaaaacacctttaacctacaattctcgtactctgctcgggcaaatggaagcggcatcattagcctatgatgtctcaggtcaaccaataaaaagtgccaccgctgaggcgttagctcaagggaaccctcatcaagttgatttctgccacgttccatacggtgcgagtcatattgaatgcagtttctccgtctcgttttcttctgaactacgtcaaccatataagtgtaactcaagcaaagttaaacaaacgctagtgcaattagtcgagctctacgaaacgaaaatcggctggactgagctagcaacccgatatttgatgaacatttgcaacggtaaatggctgtggaaaaatacccgtaaagcctattgctggaacattgtacttacaccttggccttggaacggggaaaaggttggatttgaagatattcgtactaactacacctcacggcaagactttaaaaataataaaaattggtctgctatagttgaaatgatcaaaaccgcattttctagtactgatgggctggcgatatttgaagtcagggccaccttgcacttgccaacgaatgctatggtgcggccaagccaagttttcacagaaaaagaaagtggcagtaaaagtaaatctaaaactcaaaacagtcgagtttttcagagtacaactattgatggtgaacgatcgccaatactaggggcctttaaaacgggagcagctattgcaaccattgacgactggtatcctgaagccactgagccactaagggtcggacggtttggggttcatcgcgaagatgtcacttgctaccgtcatccgtctaccggaaaagattttttctcgatattacaacaagcagagcactatattgaagtgttgagcgccaacaaaactcccgctcaagaaactatcaacgacatgcactttttaatggctaacctgattaagggtgggatgttccagcataaaggagacgggtccggcgagggtcgtggcagtcttttgacttgcggtgatgtagaagagaaccctggctgaaaggaggtaaataatgaaatggtattataagacaatcacctttctgccagagttgtgcaacaacgagtcactggctgcaaagtgtctccgcgttctgcatggatttaactatcagtatgagacacgaaatatcggcgtttcatttccgctttggtgtgatgcaacggttggaaaaaagatttcatttgtcagcaagaacaagatagaactcgacttactacttaaacaacactatttcgtccaaatggaacaacttcaatactttcatatatccaacactgttctcgtcccagaagattgtacatacgtttcctttagacgctgtcaatctatagataagctcacagcagcagggctggcaaggaaaatcagacgcctggagaaacgtgctctatctagaggcgagcaatttgacccatcatcttttgctcaaaaagagcatactgcaatagcgcactaccactcacttggggagtccagcaaacagacgaaccgcaactttcgactcaatatcaggatgctctcggagcaaccccgtgaggggaactcgatttttagtagctatggcttatcaaattcagaaaactcgtttcagcctgtacccttaatctgacctaggctgctgccaccgctgagcaataactagcataaccccttggggcctctaaacgggtcttgaggggttttttgctgaaacctcaggcatttgagaagcacacggtcacactgcttccggtagtcaataaaccggtaaaccagcaatagacataagcggctatttaacgaccctgccctgaaccgacgaccgggtcatcgtggccggatcttgcggcccctcggcttgaacgaattgttagacattatttgccgactaccttggtgatctcgcctttcacgtagtggacaaattcttccaactgatctgcgcgcgaggccaagcgatcttcttcttgtccaagataagcctgtctagcttcaagtatgacgggctgatactgggccggcaggcgctccattgcccagtcggcagcgacatccttcggcgcgattttgccggttactgcgctgtaccaaatgcgggacaacgtaagcactacatttcgctcatcgccagcccagtcgggcggcgagttccatagcgttaaggtttcatttagcgcctcaaatagatcctgttcaggaaccggatcaaagagttcctccgccgctggacctaccaaggcaacgctatgttctcttgcttttgtcagcaagatagccagatcaatgtcgatcgtggctggctcgaagatacctgcaagaatgtcattgcgctgccattctccaaattgcagttcgcgcttagctggataacgccacggaatgatgtcgtcgtgcacaacaatggtgacttctacagcgcggagaatctcgctctctccaggggaagccgaagtttccaaaaggtcgttgatcaaagctcgccgcgttgtttcatcaagccttacggtcaccgtaaccagcaaatcaatatcactgtgtggcttcaggccgccatccactgcggagccgtacaaatgtacggccagcaacgtcggttcgagatggcgctcgatgacgccaactacctctgatagttgagtcgatacttcggcgatcaccgcttccctcatactcttcctttttcaatattattgaagcatttatcagggttattgtctcatgagcggatacatatttgaatgtatttagaaaaataaacaaatagctagctcactcggtcgctacgctccgggcgtgagactgcggcgggcgctgcggacacatacaaagttacccacagattccgtggataagcaggggactaacatgtgaggcaaaacagcagggccgcgccggtggcgtttttccataggctccgccctcctgccagagttcacataaacagacgcttttccggtgcatctgtgggagccgtgaggctcaaccatgaatctgacagtacgggcgaaacccgacaggacttaaagatccccaccgtttccggcgggtcgctccctcttgcgctctcctgttccgaccctgccgtttaccggatacctgttccgcctttctcccttacgggaagtgtggcgctttctcatagctcacacactggtatctcggctcggtgtaggtcgttcgctccaagctgggctgtaagcaagaactccccgttcagcccgactgctgcgccttatccggtaactgttcacttgagtccaacccggaaaagcacggtaaaacgccactggcagcagccattggtaactgggagttcgcagaggatttgtttagctaaacacgcggttgctcttgaagtgtgcgccaaagtccggctacactggaaggacagatttggttgctgtgctctgcgaaagccagttaccacggttaagcagttccccaactgacttaaccttcgatcaaaccacctccccaggtggttttttcgtttacagggcaaaagattacgcgcagaaaaaaaggatctcaagaagatcctttgatcttttctactgaaccgctctagatttcagtgcaatttatctcttcaaatgtagcacctgaagtcagccccatacgatataagttgtaattctcatgttagtcatgccccgcgcccaccggaaggagctgactgggttgaaggctctcaagggcatcggtcgagatcccggtgcctaatgagtgagctaacttacattaattgcgttgcgctcactgcccgctttccagtcgggaaacctgtcgtgccagctgcattaatgaatcggccaacgcgcggggagaggcggtttgcgtattgggcgccagggtggtttttcttttcaccagtgagacgggcaacagctgattgcccttcaccgcctggccctgagagagttgcagcaagcggtccacgctggtttgccccagcaggcgaaaatcctgtttgatggtggttaacggcgggatataacatgagctgtcttcggtatcgtcgtatcccactaccgagatgtccgcaccaacgcgcagcccggactcggtaatggcgcgcattgcgcccagcgccatctgatcgttggcaaccagcatcgcagtgggaacgatgccctcattcagcatttgcatggtttgttgaaaaccggacatggcactccagtcgccttcccgttccgctatcggctgaatttgattgcgagtgagatatttatgccagccagccagacgcagacgcgccgagacagaacttaatgggcccgctaacagcgcgatttgctggtgacccaatgcgaccagatgctccacgcccagtcgcgtaccgtcttcatgggagaaaataatactgttgatgggtgtctggtcagagacatcaagaaataacgccggaacattagtgcaggcagcttccacagcaatggcatcctggtcatccagcggatagttaatgatcagcccactgacgcgttgcgcgagaagattgtgcaccgccgctttacaggcttcgacgccgcttcgttctaccatcgacaccaccacgctggcacccagttgatcggcgcgagatttaatcgccgcgacaatttgcgacggcgcgtgcagggccagactggaggtggcaacgccaatcagcaacgactgtttgcccgccagttgttgtgccacgcggttgggaatgtaattcagctccgccatcgccgcttccactttttcccgcgttttcgcagaaacgtggctggcctggttcaccacgcgggaaacggtctgataagagacaccggcatactctgcgacatcgtataacgttactggtttcac

SEQ ID NO: 251 - DNA, 8489 bp, Artificial Sequence
  Synthetic
attcaccaccctgaattgactctcttccgggcgctatcatgccataccgcgaaaggttttgcgccattcgatggtgtccgggatctcgacgctctcccttatgcgactcctgcattaggaaattaatacgactcactataggggaattgtgagcggataacaattcccctgtagaaataattttgtttaactttaataaggagatataccatgggtgaactgccgagtaggtagctgataacagtacagcgcggctgaaatcatcattaaagcggtgaactgccgagtaggtagctgataacggatccgaattcgagctcggcgcgcctgcaggtcgacaagcttgcggccgcataatgcttaagtcgaacagaaagtaatcgtattgtacacggccgcataatcgaaattaatacgactcactataggggaattgtgagcggataacaattccccatcttagtatattagttaagtataagaaggagatatacatatgtttttgcaaagacctaaaccttacagcgatgaaagtttagaaagtttctttatccgagtggctaacaaaaatggctacggtgatgtccatcgcttcctagaagccactaaacgattccttcaagacattgaccataatggctatcaaacctttccgactgatataactcggataaacccatactcagctaaaaacagttccagcgcacgaactgcgtcattcctgaaacttgcacaattgacatttaatgaaccgccagagctacttgggttggcaattaacagaacaaacatgaaatactcgccgtcaactagcgcggttgttagaggtgcagaagtctttcctcgcagtttactacggacgcactccatcccctgctgtcctttgtgtctgcgagaaaatggctacgcctcctacctttggcactttcaggggtacgaatactgccacagccataacgtacctttaattaccacttgtagctgtggtaaggagtttgactaccgagtatctgggttaaagggcatttgctgcaaatgcaaggagcctatcaccttaaccagcagggagaacggtcatgaggcagcgtgtactgtttcaaactggcttgctggccatgaatctaaacctctgccaaatcttcctaaaagctaccgatggggtttagttcattggtggatgggtattaaagatagcgagttcgatcacttttcgttcgttcaatttttctcaaactggccaaggtcattccactcgataatcgaagatgaagtagagttcaaccttgagcatgctgttgtcagcacgtctgaattacgactaaaagatcttcttggtcgattgtttttcggttcaattcggttacctgagcggaatcttcaacacaatatcatccttggtgagcttctctgctatttagaaaatcgtttatggcaagacaagggattaatcgccaacctcaaaatgaacgcgttagaggcgactgtaatgttaaattgtagcctcgatcagattgcatcaatggttgaacaacgcatcttgaagccaaatcgaaaaagcaagcccaacagccctcttgatgttaccgattatctatttcatttcggcgatattttctgtctttggttagctgagttccaaagcgatgagtttaaccgttcgttttatgtgtcgaggtggtaaatgcaaactctgaaagaactaatcgcatccaatcctgacgacttaacaactgaacttaagagagcatttcgtccactcacaccgcatattgcaattgatggtaatgaacttgacgcactgacgatattagtcaatttaaccgataagactgatgatcagaaagacctgctcgatcgagccaaatgcaagcaaaaacttcgagatgaaaaatggtgggctagctgcataaattgcgttaattacagacaaagccataacccaaaattcccggatatacgttctgaaggcgtgattcgaacccaagccctgggtgaattaccgagtttcctactctcgtcctcaaaaatcccaccataccattggtcatatagccatgattcaaaatacgtcaacaaaagcgcattcctcaccaatgagttttgttgggatggtgagatctcatgtttgggtgagcttcttaaagatgcagatcacccactttggaatactttgaaaaagttaggttgttctcaaaaaacttgcaaagcaatggcaaaacaactagctgatattactctcacgactatcaatgtcacactcgcaccaaattacctgactcaaatatctctccccgatagtgatacatcctacatttcactctctcctgttgcatcgctatcgatgcaaagccactttcatcagaggctccaagatgaaaatcggcatagcgcgataacgcggtttagccgaactaccaacatgggggtcactgcgatgacatgtggcggcgcatttagaatgttaaagtctggcgctaagttttccagcccccctcatcaccgattaaacagtaaacgaagttggttgacgtcagagcatgttcagtcattaaaacagtaccagcgcctcaacaaaagcctcatacctgaaaactctcggattgcactccgtagaaaatacaaaatcgagcttcaaaatatggtcagatcttggtttgcaatgcaagaccatacccttgattcgaacatacttatccaacatttgaatcatgacctatcttacttaggagccacaaaacgttttgcatacgatccagcgatgaccaagctctttactgagcttttgaaacgagagttatcaaattcaatcaataatggtgagcaacacactaatggatcgtttttagtcctaccgaatatcagggtttgtggcgcaacagctttaagctccccggtaacggtggggattccatcacttacagctttctttggcttcgttcacgcatttgaacggaatataaatcgcaccacctcatcgtttcgtgttgaatcctttgcgatatgcgtccatcaactacatgtcgagaagcgaggtttgacagcagagtttgtggaaaaaggcgacgggactatatccgctcccgcgacccgggatgactggcagtgtgatgtcgtatttagccttattttgaacaccaactttgctcaacatattgaccaagatacgttagttacatcactaccaaagcgattggctcggggttcagcaaaaattgcgattgatgactttaaacatatcaactcattctcgacattagaaacagcgatcgaatctctgccaatagaagctggtaggtggttatcactttacgcacagtcaaacaataatctaagtgatctattagcagccatgacagaggaccatcagctcatggcaagctgcgtcggttaccacttgttagaagagcccaaagataaaccaaactccctcagaggttacaaacacgctatcgccgagtgcatcattggactcattaactcaatcacctttagctcagagactgatcccaacacaatcttttggtcgctaaagaactatcaaaactacctagtggtacagccaaggagtatcaacgatgaaactaccgacaaatctagcctatgagcgctctatcgacccatcagatgtctgtttttttgtcgtctggcccgatgatagaaaaacacctttaacctacaattctcgtactctgctcgggcaaatggaagcggcatcattagcctatgatgtctcaggtcaaccaataaaaagtgccaccgctgaggcgttagctcaagggaaccctcatcaagttgatttctgccacgttccatacggtgcgagtcatattgaatgcagtttctccgtctcgttttcttctgaactacgtcaaccatataagtgtaactcaagcaaagttaaacaaacgctagtgcaattagtcgagctctacgaaacgaaaatcggctggactgagctagcaacccgatatttgatgaacatttgcaacggtaaatggctgtggaaaaatacccgtaaagcctattgctggaacattgtacttacaccttggccttggaacggggaaaaggttggatttgaagatattcgtactaactacacctcacggcaagactttaaaaataataaaaattggtctgctatagttgaaatgatcaaaaccgcattttctagtactgatgggctggcgatatttgaagtcagggccaccttgcacttgccaacgaatgctatggtgcggccaagccaagttttcacagaaaaagaaagtggcagtaaaagtaaatctaaaactcaaaacagtcgagtttttcagagtacaactattgatggtgaacgatcgccaatactaggggcctttaaaacgggagcagctattgcaaccattgacgactggtatcctgaagccactgagccactaagggtcggacggtttggggttcatcgcgaagatgtcacttgctaccgtcatccgtctaccggaaaagattttttctcgatattacaacaagcagagcactatattgaagtgttgagcgccaacaaaactcccgctcaagaaactatcaacgacatgcactttttaatggctaacctgattaagggtgggatgttccagcataaaggagactgaaaggaggtaaataatgcctaagaaaaagcgtaaagttggcaccggtgtgaaatggtattataagacaatcacctttctgccagagttgtgcaacaacgagtcactggctgcaaagtgtctccgcgttctgcatggatttaactatcagtatgagacacgaaatatcggcgtttcatttccgctttggtgtgatgcaacggttggaaaaaagatttcatttgtcagcaagaacaagatagaactcgacttactacttaaacaacactatttcgtccaaatggaacaacttcaatactttcatatatccaacactgttctcgtcccagaagattgtacatacgtttcctttagacgctgtcaatctatagataagctcacagcagcagggctggcaaggaaaatcagacgcctggagaaacgtgctctatctagaggcgagcaatttgacccatcatcttttgctcaaaaagagcatactgcaatagcgcactaccactcacttggggagtccagcaaacagacgaaccgcaactttcgactcaatatcaggatgctctcggagcaaccccgtgaggggaactcgatttttagtagctatggcttatcaaattcagaaaactcgtttcagcctgtacccttaatctgacctaggctgctgccaccgctgagcaataactagcataaccccttggggcctctaaacgggtcttgaggggttttttgctgaaacctcaggcatttgagaagcacacggtcacactgcttccggtagtcaataaaccggtaaaccagcaatagacataagcggctatttaacgaccctgccctgaaccgacgaccgggtcatcgtggccggatcttgcggcccctcggcttgaacgaattgttagacattatttgccgactaccttggtgatctcgcctttcacgtagtggacaaattcttccaactgatctgcgcgcgaggccaagcgatcttcttcttgtccaagataagcctgtctagcttcaagtatgacgggctgatactgggccggcaggcgctccattgcccagtcggcagcgacatccttcggcgcgattttgccggttactgcgctgtaccaaatgcgggacaacgtaagcactacatttcgctcatcgccagcccagtcgggcggcgagttccatagcgttaaggtttcatttagcgcctcaaatagatcctgttcaggaaccggatcaaagagttcctccgccgctggacctaccaaggcaacgctatgttctcttgcttttgtcagcaagatagccagatcaatgtcgatcgtggctggctcgaagatacctgcaagaatgtcattgcgctgccattctccaaattgcagttcgcgcttagctggataacgccacggaatgatgtcgtcgtgcacaacaatggtgacttctacagcgcggagaatctcgctctctccaggggaagccgaagtttccaaaaggtcgttgatcaaagctcgccgcgttgtttcatcaagccttacggtcaccgtaaccagcaaatcaatatcactgtgtggcttcaggccgccatccactgcggagccgtacaaatgtacggccagcaacgtcggttcgagatggcgctcgatgacgccaactacctctgatagttgagtcgatacttcggcgatcaccgcttccctcatactcttcctttttcaatattattgaagcatttatcagggttattgtctcatgagcggatacatatttgaatgtatttagaaaaataaacaaatagctagctcactcggtcgctacgctccgggcgtgagactgcggcgggcgctgcggacacatacaaagttacccacagattccgtggataagcaggggactaacatgtgaggcaaaacagcagggccgcgccggtggcgtttttccataggctccgccctcctgccagagttcacataaacagacgcttttccggtgcatctgtgggagccgtgaggctcaaccatgaatctgacagtacgggcgaaacccgacaggacttaaagatccccaccgtttccggcgggtcgctccctcttgcgctctcctgttccgaccctgccgtttaccggatacctgttccgcctttctcccttacgggaagtgtggcgctttctcatagctcacacactggtatctcggctcggtgtaggtcgttcgctccaagctgggctgtaagcaagaactccccgttcagcccgactgctgcgccttatccggtaactgttcacttgagtccaacccggaaaagcacggtaaaacgccactggcagcagccattggtaactgggagttcgcagaggatttgtttagctaaacacgcggttgctcttgaagtgtgcgccaaagtccggctacactggaaggacagatttggttgctgtgctctgcgaaagccagttaccacggttaagcagttccccaactgacttaaccttcgatcaaaccacctccccaggtggttttttcgtttacagggcaaaagattacgcgcagaaaaaaaggatctcaagaagatcctttgatcttttctactgaaccgctctagatttcagtgcaatttatctcttcaaatgtagcacctgaagtcagccccatacgatataagttgtaattctcatgttagtcatgccccgcgcccaccggaaggagctgactgggttgaaggctctcaagggcatcggtcgagatcccggtgcctaatgagtgagctaacttacattaattgcgttgcgctcactgcccgctttccagtcgggaaacctgtcgtgccagctgcattaatgaatcggccaacgcgcggggagaggcggtttgcgtattgggcgccagggtggtttttcttttcaccagtgagacgggcaacagctgattgcccttcaccgcctggccctgagagagttgcagcaagcggtccacgctggtttgccccagcaggcgaaaatcctgtttgatggtggttaacggcgggatataacatgagctgtcttcggtatcgtcgtatcccactaccgagatgtccgcaccaacgcgcagcccggactcggtaatggcgcgcattgcgcccagcgccatctgatcgttggcaaccagcatcgcagtgggaacgatgccctcattcagcatttgcatggtttgttgaaaaccggacatggcactccagtcgccttcccgttccgctatcggctgaatttgattgcgagtgagatatttatgccagccagccagacgcagacgcgccgagacagaacttaatgggcccgctaacagcgcgatttgctggtgacccaatgcgaccagatgctccacgcccagtcgcgtaccgtcttcatgggagaaaataatactgttgatgggtgtctggtcagagacatcaagaaataacgccggaacattagtgcaggcagcttccacagcaatggcatcctggtcatccagcggatagttaatgatcagcccactgacgcgttgcgcgagaagattgtgcaccgccgctttacaggcttcgacgccgcttcgttctaccatcgacaccaccacgctggcacccagttgatcggcgcgagatttaatcgccgcgacaatttgcgacggcgcgtgcagggccagactggaggtggcaacgccaatcagcaacgactgtttgcccgccagttgttgtgccacgcggttgggaatgtaattcagctccgccatcgccgcttccactttttcccgcgttttcgcagaaacgtggctggcctggttcaccacgcgggaaacggtctgataagagacaccggcatactctgcgacatcgtataacgttactggtttcac

SEQ ID NO: 252 - DNA, 8505 bp, Artificial Sequence
  Synthetic
attcaccaccctgaattgactctcttccgggcgctatcatgccataccgcgaaaggttttgcgccattcgatggtgtccgggatctcgacgctctcccttatgcgactcctgcattaggaaattaatacgactcactataggggaattgtgagcggataacaattcccctgtagaaataattttgtttaactttaataaggagatataccatgggtgaactgccgagtaggtagctgataacagtacagcgcggctgaaatcatcattaaagcggtgaactgccgagtaggtagctgataacggatccgaattcgagctcggcgcgcctgcaggtcgacaagcttgcggccgcataatgcttaagtcgaacagaaagtaatcgtattgtacacggccgcataatcgaaattaatacgactcactataggggaattgtgagcggataacaattccccatcttagtatattagttaagtataagaaggagatatacatatgtttttgcaaagacctaaaccttacagcgatgaaagtttagaaagtttctttatccgagtggctaacaaaaatggctacggtgatgtccatcgcttcctagaagccactaaacgattccttcaagacattgaccataatggctatcaaacctttccgactgatataactcggataaacccatactcagctaaaaacagttccagcgcacgaactgcgtcattcctgaaacttgcacaattgacatttaatgaaccgccagagctacttgggttggcaattaacagaacaaacatgaaatactcgccgtcaactagcgcggttgttagaggtgcagaagtctttcctcgcagtttactacggacgcactccatcccctgctgtcctttgtgtctgcgagaaaatggctacgcctcctacctttggcactttcaggggtacgaatactgccacagccataacgtacctttaattaccacttgtagctgtggtaaggagtttgactaccgagtatctgggttaaagggcatttgctgcaaatgcaaggagcctatcaccttaaccagcagggagaacggtcatgaggcagcgtgtactgtttcaaactggcttgctggccatgaatctaaacctctgccaaatcttcctaaaagctaccgatggggtttagttcattggtggatgggtattaaagatagcgagttcgatcacttttcgttcgttcaatttttctcaaactggccaaggtcattccactcgataatcgaagatgaagtagagttcaaccttgagcatgctgttgtcagcacgtctgaattacgactaaaagatcttcttggtcgattgtttttcggttcaattcggttacctgagcggaatcttcaacacaatatcatccttggtgagcttctctgctatttagaaaatcgtttatggcaagacaagggattaatcgccaacctcaaaatgaacgcgttagaggcgactgtaatgttaaattgtagcctcgatcagattgcatcaatggttgaacaacgcatcttgaagccaaatcgaaaaagcaagcccaacagccctcttgatgttaccgattatctatttcatttcggcgatattttctgtctttggttagctgagttccaaagcgatgagtttaaccgttcgttttatgtgtcgaggtggtaaatgcaaactctgaaagaactaatcgcatccaatcctgacgacttaacaactgaacttaagagagcatttcgtccactcacaccgcatattgcaattgatggtaatgaacttgacgcactgacgatattagtcaatttaaccgataagactgatgatcagaaagacctgctcgatcgagccaaatgcaagcaaaaacttcgagatgaaaaatggtgggctagctgcataaattgcgttaattacagacaaagccataacccaaaattcccggatatacgttctgaaggcgtgattcgaacccaagccctgggtgaattaccgagtttcctactctcgtcctcaaaaatcccaccataccattggtcatatagccatgattcaaaatacgtcaacaaaagcgcattcctcaccaatgagttttgttgggatggtgagatctcatgtttgggtgagcttcttaaagatgcagatcacccactttggaatactttgaaaaagttaggttgttctcaaaaaacttgcaaagcaatggcaaaacaactagctgatattactctcacgactatcaatgtcacactcgcaccaaattacctgactcaaatatctctccccgatagtgatacatcctacatttcactctctcctgttgcatcgctatcgatgcaaagccactttcatcagaggctccaagatgaaaatcggcatagcgcgataacgcggtttagccgaactaccaacatgggggtcactgcgatgacatgtggcggcgcatttagaatgttaaagtctggcgctaagttttccagcccccctcatcaccgattaaacagtaaacgaagttggttgacgtcagagcatgttcagtcattaaaacagtaccagcgcctcaacaaaagcctcatacctgaaaactctcggattgcactccgtagaaaatacaaaatcgagcttcaaaatatggtcagatcttggtttgcaatgcaagaccatacccttgattcgaacatacttatccaacatttgaatcatgacctatcttacttaggagccacaaaacgttttgcatacgatccagcgatgaccaagctctttactgagcttttgaaacgagagttatcaaattcaatcaataatggtgagcaacacactaatggatcgtttttagtcctaccgaatatcagggtttgtggcgcaacagctttaagctccccggtaacggtggggattccatcacttacagctttctttggcttcgttcacgcatttgaacggaatataaatcgcaccacctcatcgtttcgtgttgaatcctttgcgatatgcgtccatcaactacatgtcgagaagcgaggtttgacagcagagtttgtggaaaaaggcgacgggactatatccgctcccgcgacccgggatgactggcagtgtgatgtcgtatttagccttattttgaacaccaactttgctcaacatattgaccaagatacgttagttacatcactaccaaagcgattggctcggggttcagcaaaaattgcgattgatgactttaaacatatcaactcattctcgacattagaaacagcgatcgaatctctgccaatagaagctggtaggtggttatcactttacgcacagtcaaacaataatctaagtgatctattagcagccatgacagaggaccatcagctcatggcaagctgcgtcggttaccacttgttagaagagcccaaagataaaccaaactccctcagaggttacaaacacgctatcgccgagtgcatcattggactcattaactcaatcacctttagctcagagactgatcccaacacaatcttttggtcgctaaagaactatcaaaactacctagtggtacagccaaggagtatcaacgatgaaactaccgacaaatctagcctatgagcgctctatcgacccatcagatgtctgtttttttgtcgtctggcccgatgatagaaaaacacctttaacctacaattctcgtactctgctcgggcaaatggaagcggcatcattagcctatgatgtctcaggtcaaccaataaaaagtgccaccgctgaggcgttagctcaagggaaccctcatcaagttgatttctgccacgttccatacggtgcgagtcatattgaatgcagtttctccgtctcgttttcttctgaactacgtcaaccatataagtgtaactcaagcaaagttaaacaaacgctagtgcaattagtcgagctctacgaaacgaaaatcggctggactgagctagcaacccgatatttgatgaacatttgcaacggtaaatggctgtggaaaaatacccgtaaagcctattgctggaacattgtacttacaccttggccttggaacggggaaaaggttggatttgaagatattcgtactaactacacctcacggcaagactttaaaaataataaaaattggtctgctatagttgaaatgatcaaaaccgcattttctagtactgatgggctggcgatatttgaagtcagggccaccttgcacttgccaacgaatgctatggtgcggccaagccaagttttcacagaaaaagaaagtggcagtaaaagtaaatctaaaactcaaaacagtcgagtttttcagagtacaactattgatggtgaacgatcgccaatactaggggcctttaaaacgggagcagctattgcaaccattgacgactggtatcctgaagccactgagccactaagggtcggacggtttggggttcatcgcgaagatgtcacttgctaccgtcatccgtctaccggaaaagattttttctcgatattacaacaagcagagcactatattgaagtgttgagcgccaacaaaactcccgctcaagaaactatcaacgacatgcactttttaatggctaacctgattaagggtgggatgttccagcataaaggagactgactgtgaaatggtattataagacaatcacctttctgccagagttgtgcaacaacgagtcactggctgcaaagtgtctccgcgttctgcatggatttaactatcagtatgagacacgaaatatcggcgtttcatttccgctttggtgtgatgcaacggttggaaaaaagatttcatttgtcagcaagaacaagatagaactcgacttactacttaaacaacactatttcgtccaaatggaacaacttcaatactttcatatatccaacactgttctcgtcccagaagattgtacatacgtttcctttagacgctgtcaatctatagataagctcacagcagcagggctggcaaggaaaatcagacgcctggagaaacgtgctctatctagaggcgagcaatttgacccatcatcttttgctcaaaaagagcatactgcaatagcgcactaccactcacttggggagtccagcaaacagacgaaccgcaactttcgactcaatatcaggatgctctcggagcaaccccgtgaggggaactcgatttttagtagctatggcttatcaaattcagaaaactcgtttcagcctgtacccttaatcgggaaccaggagggtcgtggcagtcttttgacttgcggtgatgtagaagagaaccctggctgacctaggctgctgccaccgctgagcaataactagcataaccccttggggcctctaaacgggtcttgaggggttttttgctgaaacctcaggcatttgagaagcacacggtcacactgcttccggtagtcaataaaccggtaaaccagcaatagacataagcggctatttaacgaccctgccctgaaccgacgaccgggtcatcgtggccggatcttgcggcccctcggcttgaacgaattgttagacattatttgccgactaccttggtgatctcgcctttcacgtagtggacaaattcttccaactgatctgcgcgcgaggccaagcgatcttcttcttgtccaagataagcctgtctagcttcaagtatgacgggctgatactgggccggcaggcgctccattgcccagtcggcagcgacatccttcggcgcgattttgccggttactgcgctgtaccaaatgcgggacaacgtaagcactacatttcgctcatcgccagcccagtcgggcggcgagttccatagcgttaaggtttcatttagcgcctcaaatagatcctgttcaggaaccggatcaaagagttcctccgccgctggacctaccaaggcaacgctatgttctcttgcttttgtcagcaagatagccagatcaatgtcgatcgtggctggctcgaagatacctgcaagaatgtcattgcgctgccattctccaaattgcagttcgcgcttagctggataacgccacggaatgatgtcgtcgtgcacaacaatggtgacttctacagcgcggagaatctcgctctctccaggggaagccgaagtttccaaaaggtcgttgatcaaagctcgccgcgttgtttcatcaagccttacggtcaccgtaaccagcaaatcaatatcactgtgtggcttcaggccgccatccactgcggagccgtacaaatgtacggccagcaacgtcggttcgagatggcgctcgatgacgccaactacctctgatagttgagtcgatacttcggcgatcaccgcttccctcatactcttcctttttcaatattattgaagcatttatcagggttattgtctcatgagcggatacatatttgaatgtatttagaaaaataaacaaatagctagctcactcggtcgctacgctccgggcgtgagactgcggcgggcgctgcggacacatacaaagttacccacagattccgtggataagcaggggactaacatgtgaggcaaaacagcagggccgcgccggtggcgtttttccataggctccgccctcctgccagagttcacataaacagacgcttttccggtgcatctgtgggagccgtgaggctcaaccatgaatctgacagtacgggcgaaacccgacaggacttaaagatccccaccgtttccggcgggtcgctccctcttgcgctctcctgttccgaccctgccgtttaccggatacctgttccgcctttctcccttacgggaagtgtggcgctttctcatagctcacacactggtatctcggctcggtgtaggtcgttcgctccaagctgggctgtaagcaagaactccccgttcagcccgactgctgcgccttatccggtaactgttcacttgagtccaacccggaaaagcacggtaaaacgccactggcagcagccattggtaactgggagttcgcagaggatttgtttagctaaacacgcggttgctcttgaagtgtgcgccaaagtccggctacactggaaggacagatttggttgctgtgctctgcgaaagccagttaccacggttaagcagttccccaactgacttaaccttcgatcaaaccacctccccaggtggttttttcgtttacagggcaaaagattacgcgcagaaaaaaaggatctcaagaagatcctttgatcttttctactgaaccgctctagatttcagtgcaatttatctcttcaaatgtagcacctgaagtcagccccatacgatataagttgtaattctcatgttagtcatgccccgcgcccaccggaaggagctgactgggttgaaggctctcaagggcatcggtcgagatcccggtgcctaatgagtgagctaacttacattaattgcgttgcgctcactgcccgctttccagtcgggaaacctgtcgtgccagctgcattaatgaatcggccaacgcgcggggagaggcggtttgcgtattgggcgccagggtggtttttcttttcaccagtgagacgggcaacagctgattgcccttcaccgcctggccctgagagagttgcagcaagcggtccacgctggtttgccccagcaggcgaaaatcctgtttgatggtggttaacggcgggatataacatgagctgtcttcggtatcgtcgtatcccactaccgagatgtccgcaccaacgcgcagcccggactcggtaatggcgcgcattgcgcccagcgccatctgatcgttggcaaccagcatcgcagtgggaacgatgccctcattcagcatttgcatggtttgttgaaaaccggacatggcactccagtcgccttcccgttccgctatcggctgaatttgattgcgagtgagatatttatgccagccagccagacgcagacgcgccgagacagaacttaatgggcccgctaacagcgcgatttgctggtgacccaatgcgaccagatgctccacgcccagtcgcgtaccgtcttcatgggagaaaataatactgttgatgggtgtctggtcagagacatcaagaaataacgccggaacattagtgcaggcagcttccacagcaatggcatcctggtcatccagcggatagttaatgatcagcccactgacgcgttgcgcgagaagattgtgcaccgccgctttacaggcttcgacgccgcttcgttctaccatcgacaccaccacgctggcacccagttgatcggcgcgagatttaatcgccgcgacaatttgcgacggcgcgtgcagggccagactggaggtggcaacgccaatcagcaacgactgtttgcccgccagttgttgtgccacgcggttgggaatgtaattcagctccgccatcgccgcttccactttttcccgcgttttcgcagaaacgtggctggcctggttcaccacgcgggaaacggtctgataagagacaccggcatactctgcgacatcgtataacgttactggtttcac

SEQ ID NO: 253 - DNA, 8478 bp, Artificial Sequence
  Synthetic
attcaccaccctgaattgactctcttccgggcgctatcatgccataccgcgaaaggttttgcgccattcgatggtgtccgggatctcgacgctctcccttatgcgactcctgcattaggaaattaatacgactcactataggggaattgtgagcggataacaattcccctgtagaaataattttgtttaactttaataaggagatataccatgggtgaactgccgagtaggtagctgataacagtacagcgcggctgaaatcatcattaaagcggtgaactgccgagtaggtagctgataacggatccgaattcgagctcggcgcgcctgcaggtcgacaagcttgcggccgcataatgcttaagtcgaacagaaagtaatcgtattgtacacggccgcataatcgaaattaatacgactcactataggggaattgtgagcggataacaattccccatcttagtatattagttaagtataagaaggagatatacatatgcctaagaaaaagcgtaaagttggttctggtatgtttttgcaaagacctaaaccttacagcgatgaaagtttagaaagtttctttatccgagtggctaacaaaaatggctacggtgatgtccatcgcttcctagaagccactaaacgattccttcaagacattgaccataatggctatcaaacctttccgactgatataactcggataaacccatactcagctaaaaacagttccagcgcacgaactgcgtcattcctgaaacttgcacaattgacatttaatgaaccgccagagctacttgggttggcaattaacagaacaaacatgaaatactcgccgtcaactagcgcggttgttagaggtgcagaagtctttcctcgcagtttactacggacgcactccatcccctgctgtcctttgtgtctgcgagaaaatggctacgcctcctacctttggcactttcaggggtacgaatactgccacagccataacgtacctttaattaccacttgtagctgtggtaaggagtttgactaccgagtatctgggttaaagggcatttgctgcaaatgcaaggagcctatcaccttaaccagcagggagaacggtcatgaggcagcgtgtactgtttcaaactggcttgctggccatgaatctaaacctctgccaaatcttcctaaaagctaccgatggggtttagttcattggtggatgggtattaaagatagcgagttcgatcacttttcgttcgttcaatttttctcaaactggccaaggtcattccactcgataatcgaagatgaagtagagttcaaccttgagcatgctgttgtcagcacgtctgaattacgactaaaagatcttcttggtcgattgtttttcggttcaattcggttacctgagcggaatcttcaacacaatatcatccttggtgagcttctctgctatttagaaaatcgtttatggcaagacaagggattaatcgccaacctcaaaatgaacgcgttagaggcgactgtaatgttaaattgtagcctcgatcagattgcatcaatggttgaacaacgcatcttgaagccaaatcgaaaaagcaagcccaacagccctcttgatgttaccgattatctatttcatttcggcgatattttctgtctttggttagctgagttccaaagcgatgagtttaaccgttcgttttatgtgtcgaggtggtaaatgcaaactctgaaagaactaatcgcatccaatcctgacgacttaacaactgaacttaagagagcatttcgtccactcacaccgcatattgcaattgatggtaatgaacttgacgcactgacgatattagtcaatttaaccgataagactgatgatcagaaagacctgctcgatcgagccaaatgcaagcaaaaacttcgagatgaaaaatggtgggctagctgcataaattgcgttaattacagacaaagccataacccaaaattcccggatatacgttctgaaggcgtgattcgaacccaagccctgggtgaattaccgagtttcctactctcgtcctcaaaaatcccaccataccattggtcatatagccatgattcaaaatacgtcaacaaaagcgcattcctcaccaatgagttttgttgggatggtgagatctcatgtttgggtgagcttcttaaagatgcagatcacccactttggaatactttgaaaaagttaggttgttctcaaaaaacttgcaaagcaatggcaaaacaactagctgatattactctcacgactatcaatgtcacactcgcaccaaattacctgactcaaatatctctccccgatagtgatacatcctacatttcactctctcctgttgcatcgctatcgatgcaaagccactttcatcagaggctccaagatgaaaatcggcatagcgcgataacgcggtttagccgaactaccaacatgggggtcactgcgatgacatgtggcggcgcatttagaatgttaaagtctggcgctaagttttccagcccccctcatcaccgattaaacagtaaacgaagttggttgacgtcagagcatgttcagtcattaaaacagtaccagcgcctcaacaaaagcctcatacctgaaaactctcggattgcactccgtagaaaatacaaaatcgagcttcaaaatatggtcagatcttggtttgcaatgcaagaccatacccttgattcgaacatacttatccaacatttgaatcatgacctatcttacttaggagccacaaaacgttttgcatacgatccagcgatgaccaagctctttactgagcttttgaaacgagagttatcaaattcaatcaataatggtgagcaacacactaatggatcgtttttagtcctaccgaatatcagggtttgtggcgcaacagctttaagctccccggtaacggtggggattccatcacttacagctttctttggcttcgttcacgcatttgaacggaatataaatcgcaccacctcatcgtttcgtgttgaatcctttgcgatatgcgtccatcaactacatgtcgagaagcgaggtttgacagcagagtttgtggaaaaaggcgacgggactatatccgctcccgcgacccgggatgactggcagtgtgatgtcgtatttagccttattttgaacaccaactttgctcaacatattgaccaagatacgttagttacatcactaccaaagcgattggctcggggttcagcaaaaattgcgattgatgactttaaacatatcaactcattctcgacattagaaacagcgatcgaatctctgccaatagaagctggtaggtggttatcactttacgcacagtcaaacaataatctaagtgatctattagcagccatgacagaggaccatcagctcatggcaagctgcgtcggttaccacttgttagaagagcccaaagataaaccaaactccctcagaggttacaaacacgctatcgccgagtgcatcattggactcattaactcaatcacctttagctcagagactgatcccaacacaatcttttggtcgctaaagaactatcaaaactacctagtggtacagccaaggagtatcaacgatgaaactaccgacaaatctagcctatgagcgctctatcgacccatcagatgtctgtttttttgtcgtctggcccgatgatagaaaaacacctttaacctacaattctcgtactctgctcgggcaaatggaagcggcatcattagcctatgatgtctcaggtcaaccaataaaaagtgccaccgctgaggcgttagctcaagggaaccctcatcaagttgatttctgccacgttccatacggtgcgagtcatattgaatgcagtttctccgtctcgttttcttctgaactacgtcaaccatataagtgtaactcaagcaaagttaaacaaacgctagtgcaattagtcgagctctacgaaacgaaaatcggctggactgagctagcaacccgatatttgatgaacatttgcaacggtaaatggctgtggaaaaatacccgtaaagcctattgctggaacattgtacttacaccttggccttggaacggggaaaaggttggatttgaagatattcgtactaactacacctcacggcaagactttaaaaataataaaaattggtctgctatagttgaaatgatcaaaaccgcattttctagtactgatgggctggcgatatttgaagtcagggccaccttgcacttgccaacgaatgctatggtgcggccaagccaagttttcacagaaaaagaaagtggcagtaaaagtaaatctaaaactcaaaacagtcgagtttttcagagtacaactattgatggtgaacgatcgccaatactaggggcctttaaaacgggagcagctattgcaaccattgacgactggtatcctgaagccactgagccactaagggtcggacggtttggggttcatcgcgaagatgtcacttgctaccgtcatccgtctaccggaaaagattttttctcgatattacaacaagcagagcactatattgaagtgttgagcgccaacaaaactcccgctcaagaaactatcaacgacatgcactttttaatggctaacctgattaagggtgggatgttccagcataaaggagactgactgtgaaatggtattataagacaatcacctttctgccagagttgtgcaacaacgagtcactggctgcaaagtgtctccgcgttctgcatggatttaactatcagtatgagacacgaaatatcggcgtttcatttccgctttggtgtgatgcaacggttggaaaaaagatttcatttgtcagcaagaacaagatagaactcgacttactacttaaacaacactatttcgtccaaatggaacaacttcaatactttcatatatccaacactgttctcgtcccagaagattgtacatacgtttcctttagacgctgtcaatctatagataagctcacagcagcagggctggcaaggaaaatcagacgcctggagaaacgtgctctatctagaggcgagcaatttgacccatcatcttttgctcaaaaagagcatactgcaatagcgcactaccactcacttggggagtccagcaaacagacgaaccgcaactttcgactcaatatcaggatgctctcggagcaaccccgtgaggggaactcgatttttagtagctatggcttatcaaattcagaaaactcgtttcagcctgtacccttaatctgacctaggctgctgccaccgctgagcaataactagcataaccccttggggcctctaaacgggtcttgaggggttttttgctgaaacctcaggcatttgagaagcacacggtcacactgcttccggtagtcaataaaccggtaaaccagcaatagacataagcggctatttaacgaccctgccctgaaccgacgaccgggtcatcgtggccggatcttgcggcccctcggcttgaacgaattgttagacattatttgccgactaccttggtgatctcgcctttcacgtagtggacaaattcttccaactgatctgcgcgcgaggccaagcgatcttcttcttgtccaagataagcctgtctagcttcaagtatgacgggctgatactgggccggcaggcgctccattgcccagtcggcagcgacatccttcggcgcgattttgccggttactgcgctgtaccaaatgcgggacaacgtaagcactacatttcgctcatcgccagcccagtcgggcggcgagttccatagcgttaaggtttcatttagcgcctcaaatagatcctgttcaggaaccggatcaaagagttcctccgccgctggacctaccaaggcaacgctatgttctcttgcttttgtcagcaagatagccagatcaatgtcgatcgtggctggctcgaagatacctgcaagaatgtcattgcgctgccattctccaaattgcagttcgcgcttagctggataacgccacggaatgatgtcgtcgtgcacaacaatggtgacttctacagcgcggagaatctcgctctctccaggggaagccgaagtttccaaaaggtcgttgatcaaagctcgccgcgttgtttcatcaagccttacggtcaccgtaaccagcaaatcaatatcactgtgtggcttcaggccgccatccactgcggagccgtacaaatgtacggccagcaacgtcggttcgagatggcgctcgatgacgccaactacctctgatagttgagtcgatacttcggcgatcaccgcttccctcatactcttcctttttcaatattattgaagcatttatcagggttattgtctcatgagcggatacatatttgaatgtatttagaaaaataaacaaatagctagctcactcggtcgctacgctccgggcgtgagactgcggcgggcgctgcggacacatacaaagttacccacagattccgtggataagcaggggactaacatgtgaggcaaaacagcagggccgcgccggtggcgtttttccataggctccgccctcctgccagagttcacataaacagacgcttttccggtgcatctgtgggagccgtgaggctcaaccatgaatctgacagtacgggcgaaacccgacaggacttaaagatccccaccgtttccggcgggtcgctccctcttgcgctctcctgttccgaccctgccgtttaccggatacctgttccgcctttctcccttacgggaagtgtggcgctttctcatagctcacacactggtatctcggctcggtgtaggtcgttcgctccaagctgggctgtaagcaagaactccccgttcagcccgactgctgcgccttatccggtaactgttcacttgagtccaacccggaaaagcacggtaaaacgccactggcagcagccattggtaactgggagttcgcagaggatttgtttagctaaacacgcggttgctcttgaagtgtgcgccaaagtccggctacactggaaggacagatttggttgctgtgctctgcgaaagccagttaccacggttaagcagttccccaactgacttaaccttcgatcaaaccacctccccaggtggttttttcgtttacagggcaaaagattacgcgcagaaaaaaaggatctcaagaagatcctttgatcttttctactgaaccgctctagatttcagtgcaatttatctcttcaaatgtagcacctgaagtcagccccatacgatataagttgtaattctcatgttagtcatgccccgcgcccaccggaaggagctgactgggttgaaggctctcaagggcatcggtcgagatcccggtgcctaatgagtgagctaacttacattaattgcgttgcgctcactgcccgctttccagtcgggaaacctgtcgtgccagctgcattaatgaatcggccaacgcgcggggagaggcggtttgcgtattgggcgccagggtggtttttcttttcaccagtgagacgggcaacagctgattgcccttcaccgcctggccctgagagagttgcagcaagcggtccacgctggtttgccccagcaggcgaaaatcctgtttgatggtggttaacggcgggatataacatgagctgtcttcggtatcgtcgtatcccactaccgagatgtccgcaccaacgcgcagcccggactcggtaatggcgcgcattgcgcccagcgccatctgatcgttggcaaccagcatcgcagtgggaacgatgccctcattcagcatttgcatggtttgttgaaaaccggacatggcactccagtcgccttcccgttccgctatcggctgaatttgattgcgagtgagatatttatgccagccagccagacgcagacgcgccgagacagaacttaatgggcccgctaacagcgcgatttgctggtgacccaatgcgaccagatgctccacgcccagtcgcgtaccgtcttcatgggagaaaataatactgttgatgggtgtctggtcagagacatcaagaaataacgccggaacattagtgcaggcagcttccacagcaatggcatcctggtcatccagcggatagttaatgatcagcccactgacgcgttgcgcgagaagattgtgcaccgccgctttacaggcttcgacgccgcttcgttctaccatcgacaccaccacgctggcacccagttgatcggcgcgagatttaatcgccgcgacaatttgcgacggcgcgtgcagggccagactggaggtggcaacgccaatcagcaacgactgtttgcccgccagttgttgtgccacgcggttgggaatgtaattcagctccgccatcgccgcttccactttttcccgcgttttcgcagaaacgtggctggcctggttcaccacgcgggaaacggtctgataagagacaccggcatactctgcgacatcgtataacgttactggtttcac

SEQ ID NO: 254 - DNA, 8518 bp, Artificial Sequence
  Synthetic
attcaccaccctgaattgactctcttccgggcgctatcatgccataccgcgaaaggttttgcgccattcgatggtgtccgggatctcgacgctctcccttatgcgactcctgcattaggaaattaatacgactcactataggggaattgtgagcggataacaattcccctgtagaaataattttgtttaactttaataaggagatataccatgggtgaactgccgagtaggtagctgataacagtacagcgcggctgaaatcatcattaaagcggtgaactgccgagtaggtagctgataacggatccgaattcgagctcggcgcgcctgcaggtcgacaagcttgcggccgcataatgcttaagtcgaacagaaagtaatcgtattgtacacggccgcataatcgaaattaatacgactcactataggggaattgtgagcggataacaattccccatcttagtatattagttaagtataagaaggagatatacatatgtttttgcaaagacctaaaccttacagcgatgaaagtttagaaagtttctttatccgagtggctaacaaaaatggctacggtgatgtccatcgcttcctagaagccactaaacgattccttcaagacattgaccataatggctatcaaacctttccgactgatataactcggataaacccatactcagctaaaaacagttccagcgcacgaactgcgtcattcctgaaacttgcacaattgacatttaatgaaccgccagagctacttgggttggcaattaacagaacaaacatgaaatactcgccgtcaactagcgcggttgttagaggtgcagaagtctttcctcgcagtttactacggacgcactccatcccctgctgtcctttgtgtctgcgagaaaatggctacgcctcctacctttggcactttcaggggtacgaatactgccacagccataacgtacctttaattaccacttgtagctgtggtaaggagtttgactaccgagtatctgggttaaagggcatttgctgcaaatgcaaggagcctatcaccttaaccagcagggagaacggtcatgaggcagcgtgtactgtttcaaactggcttgctggccatgaatctaaacctctgccaaatcttcctaaaagctaccgatggggtttagttcattggtggatgggtattaaagatagcgagttcgatcacttttcgttcgttcaatttttctcaaactggccaaggtcattccactcgataatcgaagatgaagtagagttcaaccttgagcatgctgttgtcagcacgtctgaattacgactaaaagatcttcttggtcgattgtttttcggttcaattcggttacctgagcggaatcttcaacacaatatcatccttggtgagcttctctgctatttagaaaatcgtttatggcaagacaagggattaatcgccaacctcaaaatgaacgcgttagaggcgactgtaatgttaaattgtagcctcgatcagattgcatcaatggttgaacaacgcatcttgaagccaaatcgaaaaagcaagcccaacagccctcttgatgttaccgattatctatttcatttcggcgatattttctgtctttggttagctgagttccaaagcgatgagtttaaccgttcgttttatgtgtcgaggtgggggtcctcggagggtcgtggcagtcttttgacttgcggtgatgtagaagagaaccctggctaaaaggaggtaaataatgcaaactctgaaagaactaatcgcatccaatcctgacgacttaacaactgaacttaagagagcatttcgtccactcacaccgcatattgcaattgatggtaatgaacttgacgcactgacgatattagtcaatttaaccgataagactgatgatcagaaagacctgctcgatcgagccaaatgcaagcaaaaacttcgagatgaaaaatggtgggctagctgcataaattgcgttaattacagacaaagccataacccaaaattcccggatatacgttctgaaggcgtgattcgaacccaagccctgggtgaattaccgagtttcctactctcgtcctcaaaaatcccaccataccattggtcatatagccatgattcaaaatacgtcaacaaaagcgcattcctcaccaatgagttttgttgggatggtgagatctcatgtttgggtgagcttcttaaagatgcagatcacccactttggaatactttgaaaaagttaggttgttctcaaaaaacttgcaaagcaatggcaaaacaactagctgatattactctcacgactatcaatgtcacactcgcaccaaattacctgactcaaatatctctccccgatagtgatacatcctacatttcactctctcctgttgcatcgctatcgatgcaaagccactttcatcagaggctccaagatgaaaatcggcatagcgcgataacgcggtttagccgaactaccaacatgggggtcactgcgatgacatgtggcggcgcatttagaatgttaaagtctggcgctaagttttccagcccccctcatcaccgattaaacagtaaacgaagttggttgacgtcagagcatgttcagtcattaaaacagtaccagcgcctcaacaaaagcctcatacctgaaaactctcggattgcactccgtagaaaatacaaaatcgagcttcaaaatatggtcagatcttggtttgcaatgcaagaccatacccttgattcgaacatacttatccaacatttgaatcatgacctatcttacttaggagccacaaaacgttttgcatacgatccagcgatgaccaagctctttactgagcttttgaaacgagagttatcaaattcaatcaataatggtgagcaacacactaatggatcgtttttagtcctaccgaatatcagggtttgtggcgcaacagctttaagctccccggtaacggtggggattccatcacttacagctttctttggcttcgttcacgcatttgaacggaatataaatcgcaccacctcatcgtttcgtgttgaatcctttgcgatatgcgtccatcaactacatgtcgagaagcgaggtttgacagcagagtttgtggaaaaaggcgacgggactatatccgctcccgcgacccgggatgactggcagtgtgatgtcgtatttagccttattttgaacaccaactttgctcaacatattgaccaagatacgttagttacatcactaccaaagcgattggctcggggttcagcaaaaattgcgattgatgactttaaacatatcaactcattctcgacattagaaacagcgatcgaatctctgccaatagaagctggtaggtggttatcactttacgcacagtcaaacaataatctaagtgatctattagcagccatgacagaggaccatcagctcatggcaagctgcgtcggttaccacttgttagaagagcccaaagataaaccaaactccctcagaggttacaaacacgctatcgccgagtgcatcattggactcattaactcaatcacctttagctcagagactgatcccaacacaatcttttggtcgctaaagaactatcaaaactacctagtggtacagccaaggagtatcaacgatgaaactaccgacaaatctagcctatgagcgctctatcgacccatcagatgtctgtttttttgtcgtctggcccgatgatagaaaaacacctttaacctacaattctcgtactctgctcgggcaaatggaagcggcatcattagcctatgatgtctcaggtcaaccaataaaaagtgccaccgctgaggcgttagctcaagggaaccctcatcaagttgatttctgccacgttccatacggtgcgagtcatattgaatgcagtttctccgtctcgttttcttctgaactacgtcaaccatataagtgtaactcaagcaaagttaaacaaacgctagtgcaattagtcgagctctacgaaacgaaaatcggctggactgagctagcaacccgatatttgatgaacatttgcaacggtaaatggctgtggaaaaatacccgtaaagcctattgctggaacattgtacttacaccttggccttggaacggggaaaaggttggatttgaagatattcgtactaactacacctcacggcaagactttaaaaataataaaaattggtctgctatagttgaaatgatcaaaaccgcattttctagtactgatgggctggcgatatttgaagtcagggccaccttgcacttgccaacgaatgctatggtgcggccaagccaagttttcacagaaaaagaaagtggcagtaaaagtaaatctaaaactcaaaacagtcgagtttttcagagtacaactattgatggtgaacgatcgccaatactaggggcctttaaaacgggagcagctattgcaaccattgacgactggtatcctgaagccactgagccactaagggtcggacggtttggggttcatcgcgaagatgtcacttgctaccgtcatccgtctaccggaaaagattttttctcgatattacaacaagcagagcactatattgaagtgttgagcgccaacaaaactcccgctcaagaaactatcaacgacatgcactttttaatggctaacctgattaagggtgggatgttccagcataaaggagactgactgtgaaatggtattataagacaatcacctttctgccagagttgtgcaacaacgagtcactggctgcaaagtgtctccgcgttctgcatggatttaactatcagtatgagacacgaaatatcggcgtttcatttccgctttggtgtgatgcaacggttggaaaaaagatttcatttgtcagcaagaacaagatagaactcgacttactacttaaacaacactatttcgtccaaatggaacaacttcaatactttcatatatccaacactgttctcgtcccagaagattgtacatacgtttcctttagacgctgtcaatctatagataagctcacagcagcagggctggcaaggaaaatcagacgcctggagaaacgtgctctatctagaggcgagcaatttgacccatcatcttttgctcaaaaagagcatactgcaatagcgcactaccactcacttggggagtccagcaaacagacgaaccgcaactttcgactcaatatcaggatgctctcggagcaaccccgtgaggggaactcgatttttagtagctatggcttatcaaattcagaaaactcgtttcagcctgtacccttaatctgacctaggctgctgccaccgctgagcaataactagcataaccccttggggcctctaaacgggtcttgaggggttttttgctgaaacctcaggcatttgagaagcacacggtcacactgcttccggtagtcaataaaccggtaaaccagcaatagacataagcggctatttaacgaccctgccctgaaccgacgaccgggtcatcgtggccggatcttgcggcccctcggcttgaacgaattgttagacattatttgccgactaccttggtgatctcgcctttcacgtagtggacaaattcttccaactgatctgcgcgcgaggccaagcgatcttcttcttgtccaagataagcctgtctagcttcaagtatgacgggctgatactgggccggcaggcgctccattgcccagtcggcagcgacatccttcggcgcgattttgccggttactgcgctgtaccaaatgcgggacaacgtaagcactacatttcgctcatcgccagcccagtcgggcggcgagttccatagcgttaaggtttcatttagcgcctcaaatagatcctgttcaggaaccggatcaaagagttcctccgccgctggacctaccaaggcaacgctatgttctcttgcttttgtcagcaagatagccagatcaatgtcgatcgtggctggctcgaagatacctgcaagaatgtcattgcgctgccattctccaaattgcagttcgcgcttagctggataacgccacggaatgatgtcgtcgtgcacaacaatggtgacttctacagcgcggagaatctcgctctctccaggggaagccgaagtttccaaaaggtcgttgatcaaagctcgccgcgttgtttcatcaagccttacggtcaccgtaaccagcaaatcaatatcactgtgtggcttcaggccgccatccactgcggagccgtacaaatgtacggccagcaacgtcggttcgagatggcgctcgatgacgccaactacctctgatagttgagtcgatacttcggcgatcaccgcttccctcatactcttcctttttcaatattattgaagcatttatcagggttattgtctcatgagcggatacatatttgaatgtatttagaaaaataaacaaatagctagctcactcggtcgctacgctccgggcgtgagactgcggcgggcgctgcggacacatacaaagttacccacagattccgtggataagcaggggactaacatgtgaggcaaaacagcagggccgcgccggtggcgtttttccataggctccgccctcctgccagagttcacataaacagacgcttttccggtgcatctgtgggagccgtgaggctcaaccatgaatctgacagtacgggcgaaacccgacaggacttaaagatccccaccgtttccggcgggtcgctccctcttgcgctctcctgttccgaccctgccgtttaccggatacctgttccgcctttctcccttacgggaagtgtggcgctttctcatagctcacacactggtatctcggctcggtgtaggtcgttcgctccaagctgggctgtaagcaagaactccccgttcagcccgactgctgcgccttatccggtaactgttcacttgagtccaacccggaaaagcacggtaaaacgccactggcagcagccattggtaactgggagttcgcagaggatttgtttagctaaacacgcggttgctcttgaagtgtgcgccaaagtccggctacactggaaggacagatttggttgctgtgctctgcgaaagccagttaccacggttaagcagttccccaactgacttaaccttcgatcaaaccacctccccaggtggttttttcgtttacagggcaaaagattacgcgcagaaaaaaaggatctcaagaagatcctttgatcttttctactgaaccgctctagatttcagtgcaatttatctcttcaaatgtagcacctgaagtcagccccatacgatataagttgtaattctcatgttagtcatgccccgcgcccaccggaaggagctgactgggttgaaggctctcaagggcatcggtcgagatcccggtgcctaatgagtgagctaacttacattaattgcgttgcgctcactgcccgctttccagtcgggaaacctgtcgtgccagctgcattaatgaatcggccaacgcgcggggagaggcggtttgcgtattgggcgccagggtggtttttcttttcaccagtgagacgggcaacagctgattgcccttcaccgcctggccctgagagagttgcagcaagcggtccacgctggtttgccccagcaggcgaaaatcctgtttgatggtggttaacggcgggatataacatgagctgtcttcggtatcgtcgtatcccactaccgagatgtccgcaccaacgcgcagcccggactcggtaatggcgcgcattgcgcccagcgccatctgatcgttggcaaccagcatcgcagtgggaacgatgccctcattcagcatttgcatggtttgttgaaaaccggacatggcactccagtcgccttcccgttccgctatcggctgaatttgattgcgagtgagatatttatgccagccagccagacgcagacgcgccgagacagaacttaatgggcccgctaacagcgcgatttgctggtgacccaatgcgaccagatgctccacgcccagtcgcgtaccgtcttcatgggagaaaataatactgttgatgggtgtctggtcagagacatcaagaaataacgccggaacattagtgcaggcagcttccacagcaatggcatcctggtcatccagcggatagttaatgatcagcccactgacgcgttgcgcgagaagattgtgcaccgccgctttacaggcttcgacgccgcttcgttctaccatcgacaccaccacgctggcacccagttgatcggcgcgagatttaatcgccgcgacaatttgcgacggcgcgtgcagggccagactggaggtggcaacgccaatcagcaacgactgtttgcccgccagttgttgtgccacgcggttgggaatgtaattcagctccgccatcgccgcttccactttttcccgcgttttcgcagaaacgtggctggcctggttcaccacgcgggaaacggtctgataagagacaccggcatactctgcgacatcgtataacgttactggtttcac

SEQ ID NO: 255 - DNA, 6899 bp, Artificial Sequence
  Synthetic
ttcagtgcaatttatctcttcaaatgtagcacctgaagtcagccccatacgatataagttgtaattctcatgttagtcatgccccgcgcccaccggaaggagctgactgggttgaaggctctcaagggcatcggtcgagatcccggtgcctaatgagtgagctaacttacattaattgcgttgcgctcactgcccgctttccagtcgggaaacctgtcgtgccagctgcattaatgaatcggccaacgcgcggggagaggcggtttgcgtattgggcgccagggtggtttttcttttcaccagtgagacgggcaacagctgattgcccttcaccgcctggccctgagagagttgcagcaagcggtccacgctggtttgccccagcaggcgaaaatcctgtttgatggtggttaacggcgggatataacatgagctgtcttcggtatcgtcgtatcccactaccgagatgtccgcaccaacgcgcagcccggactcggtaatggcgcgcattgcgcccagcgccatctgatcgttggcaaccagcatcgcagtgggaacgatgccctcattcagcatttgcatggtttgttgaaaaccggacatggcactccagtcgccttcccgttccgctatcggctgaatttgattgcgagtgagatatttatgccagccagccagacgcagacgcgccgagacagaacttaatgggcccgctaacagcgcgatttgctggtgacccaatgcgaccagatgctccacgcccagtcgcgtaccgtcttcatgggagaaaataatactgttgatgggtgtctggtcagagacatcaagaaataacgccggaacattagtgcaggcagcttccacagcaatggcatcctggtcatccagcggatagttaatgatcagcccactgacgcgttgcgcgagaagattgtgcaccgccgctttacaggcttcgacgccgcttcgttctaccatcgacaccaccacgctggcacccagttgatcggcgcgagatttaatcgccgcgacaatttgcgacggcgcgtgcagggccagactggaggtggcaacgccaatcagcaacgactgtttgcccgccagttgttgtgccacgcggttgggaatgtaattcagctccgccatcgccgcttccactttttcccgcgttttcgcagaaacgtggctggcctggttcaccacgcgggaaacggtctgataagagacaccggcatactctgcgacatcgtataacgttactggtttcacattcaccaccctgaattgactctcttccgggcgctatcatgccataccgcgaaaggttttgcgccattcgatggtgtccgggatctcgacgctctcccttatgcgactcctgcattaggaaattaatacgactcactataggggaattgtgagcggataacaattcccctgtagaaataattttgtttaactttaataaggagatataccatggcgacaagtttacctacgccctcagcaattacgacttcggcgttagagtatgcattccatactcccgctcgcaatctaacgaaatctcgcggaaaaaacattcatcgttatgtcagtgtaaagatgagtaagaggattacggtagaatctactctagagtgtgatgcctgctatcactttgattttgagccaagtattgttcgcttttgcgctcaaccgattcgatttttatattatctcaatggtcagtctcactcctatgttcctgactttctagttcaatttgataccaacgagtttgttctatatgaagtaaagtcagcttatgctaagaacaaacctgattttgatgttgaatgggaggcgaaagtaaaagcagcaactgaactagggctagaattggagcttgttgaagagagtgatattagggatacggttgtattaaataatcttaagcgcatgcatcgttatgcttcgaaagatgagctgaataacgtacataactctctcttaaaaataataaagtacaatggcgcccaatctgcaagatgcttgggagaacagttgggtttaaaaggccgaactgttttaccaattttgtgcgatttgctgtcaaggtgtttactcgatacacgtttggataagcctctatctcttgaatctcgatttgagttggccagttatggctaagaaagggttctcaagtttccatagaaaagcagtctcttcccaagatacgcttgaatcgatagagcttgtctctagcgctaattgtctagaaagtgttacgtatcaagatatatcagcatttcccgaaacaattgcggtagagattaatttccgattaagcattcttcgctttttagcgcgaaagtgcgaaaccattgtggccaaatcaattgaaccacatcgtgtagagctacagcaaaactatagtagaaaaatacccagtgcaataacgatatatcgatggtggcttgcttttcgaaaatcagactacaaccccattagcttagcacctaatatcaaggatagaggtaatagagagacaaaagtgtcaacagttgttgattctattatggaacaggcagttgaaagagttatatctggacgaaaagtcaatgttagctctgcatataaacgtgttcgacgaaaagttcgtcaatacaatctaactcatggaacgaaatacacgtatcctaagtacgaatctgtaagaaagcgagtaaaaaagaaaaccccatttgagttattagccgcagggaaaggggagagagtagctaagagagagtttcgccgaatgggaaaaaagatcctcacgtctagcgtgctagagagggttgaaatagatcacactgtcgttgacctttttgcagtacacgaagagtatcgaatcccattgggccgaccttggcttactcaattggttgattgttacagtaaagctgtaatcggtttttatttaggtttcgagcctcctagctatgtgtcggtttcccttgcacttaagaatgcaatacaacgcaaagatgacttaatctcctcgtatgaatcgatcgagaatgaatggctatgttatggcatcccagacctactcgtaactgataatggtaaagagtttttgtcgaaagcatttgatcaagcatgtgaatcactattgatcaatgtgcatcaaaataaagttgagacgcccgacaacaaacctcatgttgaacgtaactacgggactattaatacttctctgttagacgatttacctgggaaatccttcagccagtaccttcaaagagaagggtacgactctgtgggagaagctacccttacactcaatgagattagagaaatttacttaatttggttggtggatatttatcataaaaaacccaatcagagaggcactaattgtcctaatgttgcgtggaaaaagggttgtcaagaatgggaaccagaggagttctctggttctaaagacgaattagactttaaatttgctattgttgattacaaacaacttactaaagtagggataactgtctacaaagaactgagttatagcaatgaccgtttagctgaatatagagggaagaaaggaaaccataaagttcagttcaagtataaccctgagtgtatggcagttatttgggtgttggatgaggatatgaatgagtactttacagttaatgcgattgactacgaatatgcaagtagagtatcactttggcaacataaatataacatgaaatatcaagcagaactaaattcagcagaatatgatgaggacaaggaaattgatgcagaaataaaaattgaagaaatcgcagatcgttcaattgttaagactaacaaaatcagagctcggaggcgtggcgctaggcatcaagagaatagcgcaagggctaagtcaatcagtaatgcgaacccggcctcgatacaaaaacatgaagatgaaatcgttagtgcagataatgacgattgggatattgattatgtctgaaaggaggtaaataatgccttcccctaagaaaaagcgtaaagttggcaccggtatgagtgaaacgcgtgaggctcgtatatcaagagctaaaagggcatttgtatccacaccgagcgttaggaaaatcttgagttacatggatagatgtagagatctatcagacctagagtctgagcctacatgcatgatggtctatggtgcttcgggtgtaggtaaaacgaccgtcatcaagaaatacttaaatcaaaacagaagagagtccgaagccgggggcgatataataccggttttgcatattgagttgccagacaatgcgaagccagtagatgcagcaagggaattgctggttgaaatgggtgacccgctagcactttatgaaactgacttagctagattgacgaaaagactgactgaattaatccctgcggtcggcgtgaagctgattattatcgatgagttccaacatttggtggaagaaaggtcaaatcgggttcttacccaagtaggtaattggctaaaaatgatacttaacaaaacgaaatgtccaattgttatatttggtatgccatactcaaaagttgtactgcaagcaaactcgcaacttcacgggcgattttccattcaggttgaactgcgcccctttagctaccagggaggtagaggtgtatttaaaacttttttggaataccttgataaagccctaccttttgaaaaacaggctggcttagccaacgaaagtttgcagaaaaaattgtatgcattctctcagggaaacatgcgttcgttgagaaaccttatttatcaagcatctatcgaagcaattgataatcagcatgagacgataaccgaagaagatttcgtttttgcatcgaagttgacatcgggcgataaacccaactcatggaaaaatccttttgaggagggtgttgaggtaacagaagatatgttacgaccgccaccaaaagatattggttgggaggactatttgagacattcaaccccgagagtgagtaaaccaggtagaaataaaaactttttcgaataacctaggctgctgccaccgctgagcaataactagcataaccccttggggcctctaaacgggtcttgaggggttttttgctgaaacctcaggcatttgagaagcacacggtcacactgcttccggtagtcaataaaccggtaaaccagcaatagacataagcggctatttaacgaccctgccctgaaccgacgacaagctgacgaccgggtctccgcaagtggcacttttcggggaaatgtgcgcggaacccctatttgtttatttttctaaatacattcaaatatgtatccgctcatgaattaattcttagaaaaactcatcgagcatcaaatgaaactgcaatttattcatatcaggattatcaataccatatttttgaaaaagccgtttctgtaatgaaggagaaaactcaccgaggcagttccataggatggcaagatcctggtatcggtctgcgattccgactcgtccaacatcaatacaacctattaatttcccctcgtcaaaaataaggttatcaagtgagaaatcaccatgagtgacgactgaatccggtgagaatggcaaaagtttatgcatttctttccagacttgttcaacaggccagccattacgctcgtcatcaaaatcactcgcatcaaccaaaccgttattcattcgtgattgcgcctgagcgagacgaaatacgcggtcgctgttaaaaggacaattacaaacaggaatcgaatgcaaccggcgcaggaacactgccagcgcatcaacaatattttcacctgaatcaggatattcttctaatacctggaatgctgttttcccggggatcgcagtggtgagtaaccatgcatcatcaggagtacggataaaatgcttgatggtcggaagaggcataaattccgtcagccagtttagtctgaccatctcatctgtaacatcattggcaacgctacctttgccatgtttcagaaacaactctggcgcatcgggcttcccatacaatcgatagattgtcgcacctgattgcccgacattatcgcgagcccatttatacccatataaatcagcatccatgttggaatttaatcgcggcctagagcaagacgtttcccgttgaatatggctcatactcttcctttttcaatattattgaagcatttatcagggttattgtctcatgagcggatacatatttgaatgtatttagaaaaataaacaaataggcatgctagcgcagaaacgtcctagaagatgccaggaggatacttagcagagagacaataaggccggagcgaagccgtttttccataggctccgcccccctgacgaacatcacgaaatctgacgctcaaatcagtggtggcgaaacccgacaggactataaagataccaggcgtttccccctgatggctccctcttgcgctctcctgttcccgtcctgcggcgtccgtgttgtggtggaggctttacccaaatcaccacgtcccgttccgtgtagacagttcgctccaagctgggctgtgtgcaagaaccccccgttcagcccgactgctgcgccttatccggtaactatcatcttgagtccaacccggaaagacacgacaaaacgccactggcagcagccattggtaactgagaattagtggatttagatatcgagagtcttgaagtggtggcctaacagaggctacactgaaaggacagtatttggtatctgcgctccactaaagccagttaccaggttaagcagttccccaactgacttaaccttcgatcaaaccgcctccccaggcggttttttcgtttacagagcaggagattacgacgatcgtaaaaggatctcaagaagatcctttacggattcccgacaccatcactctagat

SEQ ID NO: 256 - DNA, 6918 bp, Artificial Sequence
  Synthetic
ttcagtgcaatttatctcttcaaatgtagcacctgaagtcagccccatacgatataagttgtaattctcatgttagtcatgccccgcgcccaccggaaggagctgactgggttgaaggctctcaagggcatcggtcgagatcccggtgcctaatgagtgagctaacttacattaattgcgttgcgctcactgcccgctttccagtcgggaaacctgtcgtgccagctgcattaatgaatcggccaacgcgcggggagaggcggtttgcgtattgggcgccagggtggtttttcttttcaccagtgagacgggcaacagctgattgcccttcaccgcctggccctgagagagttgcagcaagcggtccacgctggtttgccccagcaggcgaaaatcctgtttgatggtggttaacggcgggatataacatgagctgtcttcggtatcgtcgtatcccactaccgagatgtccgcaccaacgcgcagcccggactcggtaatggcgcgcattgcgcccagcgccatctgatcgttggcaaccagcatcgcagtgggaacgatgccctcattcagcatttgcatggtttgttgaaaaccggacatggcactccagtcgccttcccgttccgctatcggctgaatttgattgcgagtgagatatttatgccagccagccagacgcagacgcgccgagacagaacttaatgggcccgctaacagcgcgatttgctggtgacccaatgcgaccagatgctccacgcccagtcgcgtaccgtcttcatgggagaaaataatactgttgatgggtgtctggtcagagacatcaagaaataacgccggaacattagtgcaggcagcttccacagcaatggcatcctggtcatccagcggatagttaatgatcagcccactgacgcgttgcgcgagaagattgtgcaccgccgctttacaggcttcgacgccgcttcgttctaccatcgacaccaccacgctggcacccagttgatcggcgcgagatttaatcgccgcgacaatttgcgacggcgcgtgcagggccagactggaggtggcaacgccaatcagcaacgactgtttgcccgccagttgttgtgccacgcggttgggaatgtaattcagctccgccatcgccgcttccactttttcccgcgttttcgcagaaacgtggctggcctggttcaccacgcgggaaacggtctgataagagacaccggcatactctgcgacatcgtataacgttactggtttcacattcaccaccctgaattgactctcttccgggcgctatcatgccataccgcgaaaggttttgcgccattcgatggtgtccgggatctcgacgctctcccttatgcgactcctgcattaggaaattaatacgactcactataggggaattgtgagcggataacaattcccctgtagaaataattttgtttaactttaataaggagatataccatggcgacaagtttacctacgccctcagcaattacgacttcggcgttagagtatgcattccatactcccgctcgcaatctaacgaaatctcgcggaaaaaacattcatcgttatgtcagtgtaaagatgagtaagaggattacggtagaatctactctagagtgtgatgcctgctatcactttgattttgagccaagtattgttcgcttttgcgctcaaccgattcgatttttatattatctcaatggtcagtctcactcctatgttcctgactttctagttcaatttgataccaacgagtttgttctatatgaagtaaagtcagcttatgctaagaacaaacctgattttgatgttgaatgggaggcgaaagtaaaagcagcaactgaactagggctagaattggagcttgttgaagagagtgatattagggatacggttgtattaaataatcttaagcgcatgcatcgttatgcttcgaaagatgagctgaataacgtacataactctctcttaaaaataataaagtacaatggcgcccaatctgcaagatgcttgggagaacagttgggtttaaaaggccgaactgttttaccaattttgtgcgatttgctgtcaaggtgtttactcgatacacgtttggataagcctctatctcttgaatctcgatttgagttggccagttatggctaagaaagggttctcaagtttccatagaaaagcagtctcttcccaagatacgcttgaatcgatagagcttgtctctagcgctaattgtctagaaagtgttacgtatcaagatatatcagcatttcccgaaacaattgcggtagagattaatttccgattaagcattcttcgctttttagcgcgaaagtgcgaaaccattgtggccaaatcaattgaaccacatcgtgtagagctacagcaaaactatagtagaaaaatacccagtgcaataacgatatatcgatggtggcttgcttttcgaaaatcagactacaaccccattagcttagcacctaatatcaaggatagaggtaatagagagacaaaagtgtcaacagttgttgattctattatggaacaggcagttgaaagagttatatctggacgaaaagtcaatgttagctctgcatataaacgtgttcgacgaaaagttcgtcaatacaatctaactcatggaacgaaatacacgtatcctaagtacgaatctgtaagaaagcgagtaaaaaagaaaaccccatttgagttattagccgcagggaaaggggagagagtagctaagagagagtttcgccgaatgggaaaaaagatcctcacgtctagcgtgctagagagggttgaaatagatcacactgtcgttgacctttttgcagtacacgaagagtatcgaatcccattgggccgaccttggcttactcaattggttgattgttacagtaaagctgtaatcggtttttatttaggtttcgagcctcctagctatgtgtcggtttcccttgcacttaagaatgcaatacaacgcaaagatgacttaatctcctcgtatgaatcgatcgagaatgaatggctatgttatggcatcccagacctactcgtaactgataatggtaaagagtttttgtcgaaagcatttgatcaagcatgtgaatcactattgatcaatgtgcatcaaaataaagttgagacgcccgacaacaaacctcatgttgaacgtaactacgggactattaatacttctctgttagacgatttacctgggaaatccttcagccagtaccttcaaagagaagggtacgactctgtgggagaagctacccttacactcaatgagattagagaaatttacttaatttggttggtggatatttatcataaaaaacccaatcagagaggcactaattgtcctaatgttgcgtggaaaaagggttgtcaagaatgggaaccagaggagttctctggttctaaagacgaattagactttaaatttgctattgttgattacaaacaacttactaaagtagggataactgtctacaaagaactgagttatagcaatgaccgtttagctgaatatagagggaagaaaggaaaccataaagttcagttcaagtataaccctgagtgtatggcagttatttgggtgttggatgaggatatgaatgagtactttacagttaatgcgattgactacgaatatgcaagtagagtatcactttggcaacataaatataacatgaaatatcaagcagaactaaattcagcagaatatgatgaggacaaggaaattgatgcagaaataaaaattgaagaaatcgcagatcgttcaattgttaagactaacaaaatcagagctcggaggcgtggcgctaggcatcaagagaatagcgcaagggctaagtcaatcagtaatgcgaacccggcctcgatacaaaaacatgaagatgaaatcgttagtgcagataatgacgattgggatattgattatgtctgagaaatcgtcaaatgagtgaaacgcgtgaggctcgtatatcaagagctaaaagggcatttgtatccacaccgagcgttaggaaaatcttgagttacatggatagatgtagagatctatcagacctagagtctgagcctacatgcatgatggtctatggtgcttcgggtgtaggtaaaacgaccgtcatcaagaaatacttaaatcaaaacagaagagagtccgaagccgggggcgatataataccggttttgcatattgagttgccagacaatgcgaagccagtagatgcagcaagggaattgctggttgaaatgggtgacccgctagcactttatgaaactgacttagctagattgacgaaaagactgactgaattaatccctgcggtcggcgtgaagctgattattatcgatgagttccaacatttggtggaagaaaggtcaaatcgggttcttacccaagtaggtaattggctaaaaatgatacttaacaaaacgaaatgtccaattgttatatttggtatgccatactcaaaagttgtactgcaagcaaactcgcaacttcacgggcgattttccattcaggttgaactgcgcccctttagctaccagggaggtagaggtgtatttaaaacttttttggaataccttgataaagccctaccttttgaaaaacaggctggcttagccaacgaaagtttgcagaaaaaattgtatgcattctctcagggaaacatgcgttcgttgagaaaccttatttatcaagcatctatcgaagcaattgataatcagcatgagacgataaccgaagaagatttcgtttttgcatcgaagttgacatcgggcgataaacccaactcatggaaaaatccttttgaggagggtgttgaggtaacagaagatatgttacgaccgccaccaaaagatattggttgggaggactatttgagacattcaaccccgagagtgagtaaaccaggtagaaataaaaactttttcgaagggtcctcggagggtcgtggcagtcttttgacttgcggtgatgtagaagagaaccctggctaacctaggctgctgccaccgctgagcaataactagcataaccccttggggcctctaaacgggtcttgaggggttttttgctgaaacctcaggcatttgagaagcacacggtcacactgcttccggtagtcaataaaccggtaaaccagcaatagacataagcggctatttaacgaccctgccctgaaccgacgacaagctgacgaccgggtctccgcaagtggcacttttcggggaaatgtgcgcggaacccctatttgtttatttttctaaatacattcaaatatgtatccgctcatgaattaattcttagaaaaactcatcgagcatcaaatgaaactgcaatttattcatatcaggattatcaataccatatttttgaaaaagccgtttctgtaatgaaggagaaaactcaccgaggcagttccataggatggcaagatcctggtatcggtctgcgattccgactcgtccaacatcaatacaacctattaatttcccctcgtcaaaaataaggttatcaagtgagaaatcaccatgagtgacgactgaatccggtgagaatggcaaaagtttatgcatttctttccagacttgttcaacaggccagccattacgctcgtcatcaaaatcactcgcatcaaccaaaccgttattcattcgtgattgcgcctgagcgagacgaaatacgcggtcgctgttaaaaggacaattacaaacaggaatcgaatgcaaccggcgcaggaacactgccagcgcatcaacaatattttcacctgaatcaggatattcttctaatacctggaatgctgttttcccggggatcgcagtggtgagtaaccatgcatcatcaggagtacggataaaatgcttgatggtcggaagaggcataaattccgtcagccagtttagtctgaccatctcatctgtaacatcattggcaacgctacctttgccatgtttcagaaacaactctggcgcatcgggcttcccatacaatcgatagattgtcgcacctgattgcccgacattatcgcgagcccatttatacccatataaatcagcatccatgttggaatttaatcgcggcctagagcaagacgtttcccgttgaatatggctcatactcttcctttttcaatattattgaagcatttatcagggttattgtctcatgagcggatacatatttgaatgtatttagaaaaataaacaaataggcatgctagcgcagaaacgtcctagaagatgccaggaggatacttagcagagagacaataaggccggagcgaagccgtttttccataggctccgcccccctgacgaacatcacgaaatctgacgctcaaatcagtggtggcgaaacccgacaggactataaagataccaggcgtttccccctgatggctccctcttgcgctctcctgttcccgtcctgcggcgtccgtgttgtggtggaggctttacccaaatcaccacgtcccgttccgtgtagacagttcgctccaagctgggctgtgtgcaagaaccccccgttcagcccgactgctgcgccttatccggtaactatcatcttgagtccaacccggaaagacacgacaaaacgccactggcagcagccattggtaactgagaattagtggatttagatatcgagagtcttgaagtggtggcctaacagaggctacactgaaaggacagtatttggtatctgcgctccactaaagccagttaccaggttaagcagttccccaactgacttaaccttcgatcaaaccgcctccccaggcggttttttcgtttacagagcaggagattacgacgatcgtaaaaggatctcaagaagatcctttacggattcccgacaccatcactctagat

SEQ ID NO: 257 - DNA, 11812 bp, Artificial Sequence
  Synthetic
attcaccaccctgaattgactctcttccgggcgctatcatgccataccgcgaaaggttttgcgccattcgatggtgtccgggatctcgacgctctcccttatgcgactcctgcattaggaaattaatacgactcactataggggaattgtgagcggataacaattcccctgtagaaataattttgtttaactttaataaggagatataccatgggtgaactgccgagtaggtagctgataacgagacctctgtcttgtcagctagggtggtctcgtgaactgccgagtaggtagctgataacggatccgaattcgagcgaaggagatatacatatgtttttgcaaagacctaaaccttacagcgatgaaagtttagaaagtttctttatccgagtggctaacaaaaatggctacggtgatgtccatcgcttcctagaagccactaaacgattccttcaagacattgaccataatggctatcaaacctttccgactgatataactcggataaacccatactcagctaaaaacagttccagcgcacgaactgcgtcattcctgaaacttgcacaattgacatttaatgaaccgccagagctacttgggttggcaattaacagaacaaacatgaaatactcgccgtcaactagcgcggttgttagaggtgcagaagtctttcctcgcagtttactacggacgcactccatcccctgctgtcctttgtgtctgcgagaaaatggctacgcctcctacctttggcactttcaggggtacgaatactgccacagccataacgtacctttaattaccacttgtagctgtggtaaggagtttgactaccgagtatctgggttaaagggcatttgctgcaaatgcaaggagcctatcaccttaaccagcagggagaacggtcatgaggcagcgtgtactgtttcaaactggcttgctggccatgaatctaaacctctgccaaatcttcctaaaagctaccgatggggtttagttcattggtggatgggtattaaagatagcgagttcgatcacttttcgttcgttcaatttttctcaaactggccaaggtcattccactcgataatcgaagatgaagtagagttcaaccttgagcatgctgttgtcagcacgtctgaattacgactaaaagatcttcttggtcgattgtttttcggttcaattcggttacctgagcggaatcttcaacacaatatcatccttggtgagcttctctgctatttagaaaatcgtttatggcaagacaagggattaatcgccaacctcaaaatgaacgcgttagaggcgactgtaatgttaaattgtagcctcgatcagattgcatcaatggttgaacaacgcatcttgaagccaaatcgaaaaagcaagcccaacagccctcttgatgttaccgattatctatttcatttcggcgatattttctgtctttggttagctgagttccaaagcgatgagtttaaccgttcgttttatgtgtcgaggtggtaaatgcaaactctgaaagaactaatcgcatccaatcctgacgacttaacaactgaacttaagagagcatttcgtccactcacaccgcatattgcaattgatggtaatgaacttgacgcactgacgatattagtcaatttaaccgataagactgatgatcagaaagacctgctcgatcgagccaaatgcaagcaaaaacttcgagatgaaaaatggtgggctagctgcataaattgcgttaattacagacaaagccataacccaaaattcccggatatacgttctgaaggcgtgattcgaacccaagccctgggtgaattaccgagtttcctactctcgtcctcaaaaatcccaccataccattggtcatatagccatgattcaaaatacgtcaacaaaagcgcattcctcaccaatgagttttgttgggatggtgagatctcatgtttgggtgagcttcttaaagatgcagatcacccactttggaatactttgaaaaagttaggttgttctcaaaaaacttgcaaagcaatggcaaaacaactagctgatattactctcacgactatcaatgtcacactcgcaccaaattacctgactcaaatatctctccccgatagtgatacatcctacatttcactctctcctgttgcatcgctatcgatgcaaagccactttcatcagaggctccaagatgaaaatcggcatagcgcgataacgcggtttagccgaactaccaacatgggggtcactgcgatgacatgtggcggcgcatttagaatgttaaagtctggcgctaagttttccagcccccctcatcaccgattaaacagtaaacgaagttggttgacgtcagagcatgttcagtcattaaaacagtaccagcgcctcaacaaaagcctcatacctgaaaactctcggattgcactccgtagaaaatacaaaatcgagcttcaaaatatggtcagatcttggtttgcaatgcaagaccatacccttgattcgaacatacttatccaacatttgaatcatgacctatcttacttaggagccacaaaacgttttgcatacgatccagcgatgaccaagctctttactgagcttttgaaacgagagttatcaaattcaatcaataatggtgagcaacacactaatggatcgtttttagtcctaccgaatatcagggtttgtggcgcaacagctttaagctccccggtaacggtggggattccatcacttacagctttctttggcttcgttcacgcatttgaacggaatataaatcgcaccacctcatcgtttcgtgttgaatcctttgcgatatgcgtccatcaactacatgtcgagaagcgaggtttgacagcagagtttgtggaaaaaggcgacgggactatatccgctcccgcgacccgggatgactggcagtgtgatgtcgtatttagccttattttgaacaccaactttgctcaacatattgaccaagatacgttagttacatcactaccaaagcgattggctcggggttcagcaaaaattgcgattgatgactttaaacatatcaactcattctcgacattagaaacagcgatcgaatctctgccaatagaagctggtaggtggttatcactttacgcacagtcaaacaataatctaagtgatctattagcagccatgacagaggaccatcagctcatggcaagctgcgtcggttaccacttgttagaagagcccaaagataaaccaaactccctcagaggttacaaacacgctatcgccgagtgcatcattggactcattaactcaatcacctttagctcagagactgatcccaacacaatcttttggtcgctaaagaactatcaaaactacctagtggtacagccaaggagtatcaacgatgaaactaccgacaaatctagcctatgagcgctctatcgacccatcagatgtctgtttttttgtcgtctggcccgatgatagaaaaacacctttaacctacaattctcgtactctgctcgggcaaatggaagcggcatcattagcctatgatgtctcaggtcaaccaataaaaagtgccaccgctgaggcgttagctcaagggaaccctcatcaagttgatttctgccacgttccatacggtgcgagtcatattgaatgcagtttctccgtctcgttttcttctgaactacgtcaaccatataagtgtaactcaagcaaagttaaacaaacgctagtgcaattagtcgagctctacgaaacgaaaatcggctggactgagctagcaacccgatatttgatgaacatttgcaacggtaaatggctgtggaaaaatacccgtaaagcctattgctggaacattgtacttacaccttggccttggaacggggaaaaggttggatttgaagatattcgtactaactacacctcacggcaagactttaaaaataataaaaattggtctgctatagttgaaatgatcaaaaccgcattttctagtactgatgggctggcgatatttgaagtcagggccaccttgcacttgccaacgaatgctatggtgcggccaagccaagttttcacagaaaaagaaagtggcagtaaaagtaaatctaaaactcaaaacagtcgagtttttcagagtacaactattgatggtgaacgatcgccaatactaggggcctttaaaacgggagcagctattgcaaccattgacgactggtatcctgaagccactgagccactaagggtcggacggtttggggttcatcgcgaagatgtcacttgctaccgtcatccgtctaccggaaaagattttttctcgatattacaacaagcagagcactatattgaagtgttgagcgccaacaaaactcccgctcaagaaactatcaacgacatgcactttttaatggctaacctgattaagggtgggatgttccagcataaaggagactgactgtgaaatggtattataagacaatcacctttctgccagagttgtgcaacaacgagtcactggctgcaaagtgtctccgcgttctgcatggatttaactatcagtatgagacacgaaatatcggcgtttcatttccgctttggtgtgatgcaacggttggaaaaaagatttcatttgtcagcaagaacaagatagaactcgacttactacttaaacaacactatttcgtccaaatggaacaacttcaatactttcatatatccaacactgttctcgtcccagaagattgtacatacgtttcctttagacgctgtcaatctatagataagctcacagcagcagggctggcaaggaaaatcagacgcctggagaaacgtgctctatctagaggcgagcaatttgacccatcatcttttgctcaaaaagagcatactgcaatagcgcactaccactcacttggggagtccagcaaacagacgaaccgcaactttcgactcaatatcaggatgctctcggagcaaccccgtgaggggaactcgatttttagtagctatggcttatcaaattcagaaaactcgtttcagcctgtacccttaatctgacctttaataaggagatataccatggcgacaagtttacctacgccctcagcaattacgacttcggcgttagagtatgcattccatactcccgctcgcaatctaacgaaatctcgcggaaaaaacattcatcgttatgtcagtgtaaagatgagtaagaggattacggtagaatctactctagagtgtgatgcctgctatcactttgattttgagccaagtattgttcgcttttgcgctcaaccgattcgatttttatattatctcaatggtcagtctcactcctatgttcctgactttctagttcaatttgataccaacgagtttgttctatatgaagtaaagtcagcttatgctaagaacaaacctgattttgatgttgaatgggaggcgaaagtaaaagcagcaactgaactagggctagaattggagcttgttgaagagagtgatattagggatacggttgtattaaataatcttaagcgcatgcatcgttatgcttcgaaagatgagctgaataacgtacataactctctcttaaaaataataaagtacaatggcgcccaatctgcaagatgcttgggagaacagttgggtttaaaaggccgaactgttttaccaattttgtgcgatttgctgtcaaggtgtttactcgatacacgtttggataagcctctatctcttgaatctcgatttgagttggccagttatggctaagaaagggttctcaagtttccatagaaaagcagtctcttcccaagatacgcttgaatcgatagagcttgtctctagcgctaattgtctagaaagtgttacgtatcaagatatatcagcatttcccgaaacaattgcggtagagattaatttccgattaagcattcttcgctttttagcgcgaaagtgcgaaaccattgtggccaaatcaattgaaccacatcgtgtagagctacagcaaaactatagtagaaaaatacccagtgcaataacgatatatcgatggtggcttgcttttcgaaaatcagactacaaccccattagcttagcacctaatatcaaggatagaggtaatagagagacaaaagtgtcaacagttgttgattctattatggaacaggcagttgaaagagttatatctggacgaaaagtcaatgttagctctgcatataaacgtgttcgacgaaaagttcgtcaatacaatctaactcatggaacgaaatacacgtatcctaagtacgaatctgtaagaaagcgagtaaaaaagaaaaccccatttgagttattagccgcagggaaaggggagagagtagctaagagagagtttcgccgaatgggaaaaaagatcctcacgtctagcgtgctagagagggttgaaatagatcacactgtcgttgacctttttgcagtacacgaagagtatcgaatcccattgggccgaccttggcttactcaattggttgattgttacagtaaagctgtaatcggtttttatttaggtttcgagcctcctagctatgtgtcggtttcccttgcacttaagaatgcaatacaacgcaaagatgacttaatctcctcgtatgaatcgatcgagaatgaatggctatgttatggcatcccagacctactcgtaactgataatggtaaagagtttttgtcgaaagcatttgatcaagcatgtgaatcactattgatcaatgtgcatcaaaataaagttgagacgcccgacaacaaacctcatgttgaacgtaactacgggactattaatacttctctgttagacgatttacctgggaaatccttcagccagtaccttcaaagagaagggtacgactctgtgggagaagctacccttacactcaatgagattagagaaatttacttaatttggttggtggatatttatcataaaaaacccaatcagagaggcactaattgtcctaatgttgcgtggaaaaagggttgtcaagaatgggaaccagaggagttctctggttctaaagacgaattagactttaaatttgctattgttgattacaaacaacttactaaagtagggataactgtctacaaagaactgagttatagcaatgaccgtttagctgaatatagagggaagaaaggaaaccataaagttcagttcaagtataaccctgagtgtatggcagttatttgggtgttggatgaggatatgaatgagtactttacagttaatgcgattgactacgaatatgcaagtagagtatcactttggcaacataaatataacatgaaatatcaagcagaactaaattcagcagaatatgatgaggacaaggaaattgatgcagaaataaaaattgaagaaatcgcagatcgttcaattgttaagactaacaaaatcagagctcggaggcgtggcgctaggcatcaagagaatagcgcaagggctaagtcaatcagtaatgcgaacccggcctcgatacaaaaacatgaagatgaaatcgttagtgcagataatgacgattgggatattgattatgtctgagaaatcgtcaaatgagtgaaacgcgtgaggctcgtatatcaagagctaaaagggcatttgtatccacaccgagcgttaggaaaatcttgagttacatggatagatgtagagatctatcagacctagagtctgagcctacatgcatgatggtctatggtgcttcgggtgtaggtaaaacgaccgtcatcaagaaatacttaaatcaaaacagaagagagtccgaagccgggggcgatataataccggttttgcatattgagttgccagacaatgcgaagccagtagatgcagcaagggaattgctggttgaaatgggtgacccgctagcactttatgaaactgacttagctagattgacgaaaagactgactgaattaatccctgcggtcggcgtgaagctgattattatcgatgagttccaacatttggtggaagaaaggtcaaatcgggttcttacccaagtaggtaattggctaaaaatgatacttaacaaaacgaaatgtccaattgttatatttggtatgccatactcaaaagttgtactgcaagcaaactcgcaacttcacgggcgattttccattcaggttgaactgcgcccctttagctaccagggaggtagaggtgtatttaaaacttttttggaataccttgataaagccctaccttttgaaaaacaggctggcttagccaacgaaagtttgcagaaaaaattgtatgcattctctcagggaaacatgcgttcgttgagaaaccttatttatcaagcatctatcgaagcaattgataatcagcatgagacgataaccgaagaagatttcgtttttgcatcgaagttgacatcgggcgataaacccaactcatggaaaaatccttttgaggagggtgttgaggtaacagaagatatgttacgaccgccaccaaaagatattggttgggaggactatttgagacattcaaccccgagagtgagtaaaccaggtagaaataaaaactttttcgaataacctaggctgctgcgctgctgccaccgctgagcaataactagcataaccccttggggcctctaaacgggtcttgaggggttttttgctgaaacctcaggcatttgagaagcacacggtcacactgcttccggtagtcaataaaccggtaaaccagcaatagacataagcggctatttaacgaccctgccctgaaccgacgaccgggtcatcgtggccggatcttgcggcccctcggcttgaacgaattgttagacattatttgccgactaccttggtgatctcgcctttcacgtagtggacaaattcttccaactgatctgcgcgcgaggccaagcgatcttcttcttgtccaagataagcctgtctagcttcaagtatgacgggctgatactgggccggcaggcgctccattgcccagtcggcagcgacatccttcggcgcgattttgccggttactgcgctgtaccaaatgcgggacaacgtaagcactacatttcgctcatcgccagcccagtcgggcggcgagttccatagcgttaaggtttcatttagcgcctcaaatagatcctgttcaggaaccggatcaaagagttcctccgccgctggacctaccaaggcaacgctatgttctcttgcttttgtcagcaagatagccagatcaatgtcgatcgtggctggctcgaagatacctgcaagaatgtcattgcgctgccattctccaaattgcagttcgcgcttagctggataacgccacggaatgatgtcgtcgtgcacaacaatggtgacttctacagcgcggagaatctcgctctctccaggggaagccgaagtttccaaaaggtcgttgatcaaagctcgccgcgttgtttcatcaagccttacggtcaccgtaaccagcaaatcaatatcactgtgtggcttcaggccgccatccactgcggagccgtacaaatgtacggccagcaacgtcggttcgagatggcgctcgatgacgccaactacctctgatagttgagtcgatacttcggcgatcaccgcttccctcatactcttcctttttcaatattattgaagcatttatcagggttattgtctcatgagcggatacatatttgaatgtatttagaaaaataaacaaatagctagctcactcggtcgctacgctccgggcgtgagactgcggcgggcgctgcggacacatacaaagttacccacagattccgtggataagcaggggactaacatgtgaggcaaaacagcagggccgcgccggtggcgtttttccataggctccgccctcctgccagagttcacataaacagacgcttttccggtgcatctgtgggagccgtgaggctcaaccatgaatctgacagtacgggcgaaacccgacaggacttaaagatccccaccgtttccggcgggtcgctccctcttgcgctctcctgttccgaccctgccgtttaccggatacctgttccgcctttctcccttacgggaagtgtggcgctttctcatagctcacacactggtatctcggctcggtgtaggtcgttcgctccaagctgggctgtaagcaagaactccccgttcagcccgactgctgcgccttatccggtaactgttcacttgagtccaacccggaaaagcacggtaaaacgccactggcagcagccattggtaactgggagttcgcagaggatttgtttagctaaacacgcggttgctcttgaagtgtgcgccaaagtccggctacactggaaggacagatttggttgctgtgctctgcgaaagccagttaccacggttaagcagttccccaactgacttaaccttcgatcaaaccacctccccaggtggttttttcgtttacagggcaaaagattacgcgcagaaaaaaaggatctcaagaagatcctttgatcttttctactgaaccgctctagatttcagtgcaatttatctcttcaaatgtagcacctgaagtcagccccatacgatataagttgtaattctcatgttagtcatgccccgcgcccaccggaaggagctgactgggttgaaggctctcaagggcatcggtcgagatcccggtgcctaatgagtgagctaacttacattaattgcgttgcgctcactgcccgctttccagtcgggaaacctgtcgtgccagctgcattaatgaatcggccaacgcgcggggagaggcggtttgcgtattgggcgccagggtggtttttcttttcaccagtgagacgggcaacagctgattgcccttcaccgcctggccctgagagagttgcagcaagcggtccacgctggtttgccccagcaggcgaaaatcctgtttgatggtggttaacggcgggatataacatgagctgtcttcggtatcgtcgtatcccactaccgagatgtccgcaccaacgcgcagcccggactcggtaatggcgcgcattgcgcccagcgccatctgatcgttggcaaccagcatcgcagtgggaacgatgccctcattcagcatttgcatggtttgttgaaaaccggacatggcactccagtcgccttcccgttccgctatcggctgaatttgattgcgagtgagatatttatgccagccagccagacgcagacgcgccgagacagaacttaatgggcccgctaacagcgcgatttgctggtgacccaatgcgaccagatgctccacgcccagtcgcgtaccgtcttcatgggagaaaataatactgttgatgggtgtctggtcagagacatcaagaaataacgccggaacattagtgcaggcagcttccacagcaatggcatcctggtcatccagcggatagttaatgatcagcccactgacgcgttgcgcgagaagattgtgcaccgccgctttacaggcttcgacgccgcttcgttctaccatcgacaccaccacgctggcacccagttgatcggcgcgagatttaatcgccgcgacaatttgcgacggcgcgtgcagggccagactggaggtggcaacgccaatcagcaacgactgtttgcccgccagttgttgtgccacgcggttgggaatgtaattcagctccgccatcgccgcttccactttttcccgcgttttcgcagaaacgtggctggcctggttcaccacgcgggaaacggtctgataagagacaccggcatactctgcgacatcgtataacgttactggtttcac

SEQ ID NO: 258 - DNA, 11812 bp, Artificial Sequence
  Synthetic
attcaccaccctgaattgactctcttccgggcgctatcatgccataccgcgaaaggttttgcgccattcgatggtgtccgggatctcgacgctctcccttatgcgactcctgcattaggaaattaatacgactcactataggggaattgtgagcggataacaattcccctgtagaaataattttgtttaactttaataaggagatataccatgggtgaactgccgagtaggtagctgataacagtacagcgcggctgaaatcatcattaaagcggtgaactgccgagtaggtagctgataacggatccgaattcgagcgaaggagatatacatatgtttttgcaaagacctaaaccttacagcgatgaaagtttagaaagtttctttatccgagtggctaacaaaaatggctacggtgatgtccatcgcttcctagaagccactaaacgattccttcaagacattgaccataatggctatcaaacctttccgactgatataactcggataaacccatactcagctaaaaacagttccagcgcacgaactgcgtcattcctgaaacttgcacaattgacatttaatgaaccgccagagctacttgggttggcaattaacagaacaaacatgaaatactcgccgtcaactagcgcggttgttagaggtgcagaagtctttcctcgcagtttactacggacgcactccatcccctgctgtcctttgtgtctgcgagaaaatggctacgcctcctacctttggcactttcaggggtacgaatactgccacagccataacgtacctttaattaccacttgtagctgtggtaaggagtttgactaccgagtatctgggttaaagggcatttgctgcaaatgcaaggagcctatcaccttaaccagcagggagaacggtcatgaggcagcgtgtactgtttcaaactggcttgctggccatgaatctaaacctctgccaaatcttcctaaaagctaccgatggggtttagttcattggtggatgggtattaaagatagcgagttcgatcacttttcgttcgttcaatttttctcaaactggccaaggtcattccactcgataatcgaagatgaagtagagttcaaccttgagcatgctgttgtcagcacgtctgaattacgactaaaagatcttcttggtcgattgtttttcggttcaattcggttacctgagcggaatcttcaacacaatatcatccttggtgagcttctctgctatttagaaaatcgtttatggcaagacaagggattaatcgccaacctcaaaatgaacgcgttagaggcgactgtaatgttaaattgtagcctcgatcagattgcatcaatggttgaacaacgcatcttgaagccaaatcgaaaaagcaagcccaacagccctcttgatgttaccgattatctatttcatttcggcgatattttctgtctttggttagctgagttccaaagcgatgagtttaaccgttcgttttatgtgtcgaggtggtaaatgcaaactctgaaagaactaatcgcatccaatcctgacgacttaacaactgaacttaagagagcatttcgtccactcacaccgcatattgcaattgatggtaatgaacttgacgcactgacgatattagtcaatttaaccgataagactgatgatcagaaagacctgctcgatcgagccaaatgcaagcaaaaacttcgagatgaaaaatggtgggctagctgcataaattgcgttaattacagacaaagccataacccaaaattcccggatatacgttctgaaggcgtgattcgaacccaagccctgggtgaattaccgagtttcctactctcgtcctcaaaaatcccaccataccattggtcatatagccatgattcaaaatacgtcaacaaaagcgcattcctcaccaatgagttttgttgggatggtgagatctcatgtttgggtgagcttcttaaagatgcagatcacccactttggaatactttgaaaaagttaggttgttctcaaaaaacttgcaaagcaatggcaaaacaactagctgatattactctcacgactatcaatgtcacactcgcaccaaattacctgactcaaatatctctccccgatagtgatacatcctacatttcactctctcctgttgcatcgctatcgatgcaaagccactttcatcagaggctccaagatgaaaatcggcatagcgcgataacgcggtttagccgaactaccaacatgggggtcactgcgatgacatgtggcggcgcatttagaatgttaaagtctggcgctaagttttccagcccccctcatcaccgattaaacagtaaacgaagttggttgacgtcagagcatgttcagtcattaaaacagtaccagcgcctcaacaaaagcctcatacctgaaaactctcggattgcactccgtagaaaatacaaaatcgagcttcaaaatatggtcagatcttggtttgcaatgcaagaccatacccttgattcgaacatacttatccaacatttgaatcatgacctatcttacttaggagccacaaaacgttttgcatacgatccagcgatgaccaagctctttactgagcttttgaaacgagagttatcaaattcaatcaataatggtgagcaacacactaatggatcgtttttagtcctaccgaatatcagggtttgtggcgcaacagctttaagctccccggtaacggtggggattccatcacttacagctttctttggcttcgttcacgcatttgaacggaatataaatcgcaccacctcatcgtttcgtgttgaatcctttgcgatatgcgtccatcaactacatgtcgagaagcgaggtttgacagcagagtttgtggaaaaaggcgacgggactatatccgctcccgcgacccgggatgactggcagtgtgatgtcgtatttagccttattttgaacaccaactttgctcaacatattgaccaagatacgttagttacatcactaccaaagcgattggctcggggttcagcaaaaattgcgattgatgactttaaacatatcaactcattctcgacattagaaacagcgatcgaatctctgccaatagaagctggtaggtggttatcactttacgcacagtcaaacaataatctaagtgatctattagcagccatgacagaggaccatcagctcatggcaagctgcgtcggttaccacttgttagaagagcccaaagataaaccaaactccctcagaggttacaaacacgctatcgccgagtgcatcattggactcattaactcaatcacctttagctcagagactgatcccaacacaatcttttggtcgctaaagaactatcaaaactacctagtggtacagccaaggagtatcaacgatgaaactaccgacaaatctagcctatgagcgctctatcgacccatcagatgtctgtttttttgtcgtctggcccgatgatagaaaaacacctttaacctacaattctcgtactctgctcgggcaaatggaagcggcatcattagcctatgatgtctcaggtcaaccaataaaaagtgccaccgctgaggcgttagctcaagggaaccctcatcaagttgatttctgccacgttccatacggtgcgagtcatattgaatgcagtttctccgtctcgttttcttctgaactacgtcaaccatataagtgtaactcaagcaaagttaaacaaacgctagtgcaattagtcgagctctacgaaacgaaaatcggctggactgagctagcaacccgatatttgatgaacatttgcaacggtaaatggctgtggaaaaatacccgtaaagcctattgctggaacattgtacttacaccttggccttggaacggggaaaaggttggatttgaagatattcgtactaactacacctcacggcaagactttaaaaataataaaaattggtctgctatagttgaaatgatcaaaaccgcattttctagtactgatgggctggcgatatttgaagtcagggccaccttgcacttgccaacgaatgctatggtgcggccaagccaagttttcacagaaaaagaaagtggcagtaaaagtaaatctaaaactcaaaacagtcgagtttttcagagtacaactattgatggtgaacgatcgccaatactaggggcctttaaaacgggagcagctattgcaaccattgacgactggtatcctgaagccactgagccactaagggtcggacggtttggggttcatcgcgaagatgtcacttgctaccgtcatccgtctaccggaaaagattttttctcgatattacaacaagcagagcactatattgaagtgttgagcgccaacaaaactcccgctcaagaaactatcaacgacatgcactttttaatggctaacctgattaagggtgggatgttccagcataaaggagactgactgtgaaatggtattataagacaatcacctttctgccagagttgtgcaacaacgagtcactggctgcaaagtgtctccgcgttctgcatggatttaactatcagtatgagacacgaaatatcggcgtttcatttccgctttggtgtgatgcaacggttggaaaaaagatttcatttgtcagcaagaacaagatagaactcgacttactacttaaacaacactatttcgtccaaatggaacaacttcaatactttcatatatccaacactgttctcgtcccagaagattgtacatacgtttcctttagacgctgtcaatctatagataagctcacagcagcagggctggcaaggaaaatcagacgcctggagaaacgtgctctatctagaggcgagcaatttgacccatcatcttttgctcaaaaagagcatactgcaatagcgcactaccactcacttggggagtccagcaaacagacgaaccgcaactttcgactcaatatcaggatgctctcggagcaaccccgtgaggggaactcgatttttagtagctatggcttatcaaattcagaaaactcgtttcagcctgtacccttaatctgacctttaataaggagatataccatggcgacaagtttacctacgccctcagcaattacgacttcggcgttagagtatgcattccatactcccgctcgcaatctaacgaaatctcgcggaaaaaacattcatcgttatgtcagtgtaaagatgagtaagaggattacggtagaatctactctagagtgtgatgcctgctatcactttgattttgagccaagtattgttcgcttttgcgctcaaccgattcgatttttatattatctcaatggtcagtctcactcctatgttcctgactttctagttcaatttgataccaacgagtttgttctatatgaagtaaagtcagcttatgctaagaacaaacctgattttgatgttgaatgggaggcgaaagtaaaagcagcaactgaactagggctagaattggagcttgttgaagagagtgatattagggatacggttgtattaaataatcttaagcgcatgcatcgttatgcttcgaaagatgagctgaataacgtacataactctctcttaaaaataataaagtacaatggcgcccaatctgcaagatgcttgggagaacagttgggtttaaaaggccgaactgttttaccaattttgtgcgatttgctgtcaaggtgtttactcgatacacgtttggataagcctctatctcttgaatctcgatttgagttggccagttatggctaagaaagggttctcaagtttccatagaaaagcagtctcttcccaagatacgcttgaatcgatagagcttgtctctagcgctaattgtctagaaagtgttacgtatcaagatatatcagcatttcccgaaacaattgcggtagagattaatttccgattaagcattcttcgctttttagcgcgaaagtgcgaaaccattgtggccaaatcaattgaaccacatcgtgtagagctacagcaaaactatagtagaaaaatacccagtgcaataacgatatatcgatggtggcttgcttttcgaaaatcagactacaaccccattagcttagcacctaatatcaaggatagaggtaatagagagacaaaagtgtcaacagttgttgattctattatggaacaggcagttgaaagagttatatctggacgaaaagtcaatgttagctctgcatataaacgtgttcgacgaaaagttcgtcaatacaatctaactcatggaacgaaatacacgtatcctaagtacgaatctgtaagaaagcgagtaaaaaagaaaaccccatttgagttattagccgcagggaaaggggagagagtagctaagagagagtttcgccgaatgggaaaaaagatcctcacgtctagcgtgctagagagggttgaaatagatcacactgtcgttgacctttttgcagtacacgaagagtatcgaatcccattgggccgaccttggcttactcaattggttgattgttacagtaaagctgtaatcggtttttatttaggtttcgagcctcctagctatgtgtcggtttcccttgcacttaagaatgcaatacaacgcaaagatgacttaatctcctcgtatgaatcgatcgagaatgaatggctatgttatggcatcccagacctactcgtaactgataatggtaaagagtttttgtcgaaagcatttgatcaagcatgtgaatcactattgatcaatgtgcatcaaaataaagttgagacgcccgacaacaaacctcatgttgaacgtaactacgggactattaatacttctctgttagacgatttacctgggaaatccttcagccagtaccttcaaagagaagggtacgactctgtgggagaagctacccttacactcaatgagattagagaaatttacttaatttggttggtggatatttatcataaaaaacccaatcagagaggcactaattgtcctaatgttgcgtggaaaaagggttgtcaagaatgggaaccagaggagttctctggttctaaagacgaattagactttaaatttgctattgttgattacaaacaacttactaaagtagggataactgtctacaaagaactgagttatagcaatgaccgtttagctgaatatagagggaagaaaggaaaccataaagttcagttcaagtataaccctgagtgtatggcagttatttgggtgttggatgaggatatgaatgagtactttacagttaatgcgattgactacgaatatgcaagtagagtatcactttggcaacataaatataacatgaaatatcaagcagaactaaattcagcagaatatgatgaggacaaggaaattgatgcagaaataaaaattgaagaaatcgcagatcgttcaattgttaagactaacaaaatcagagctcggaggcgtggcgctaggcatcaagagaatagcgcaagggctaagtcaatcagtaatgcgaacccggcctcgatacaaaaacatgaagatgaaatcgttagtgcagataatgacgattgggatattgattatgtctgagaaatcgtcaaatgagtgaaacgcgtgaggctcgtatatcaagagctaaaagggcatttgtatccacaccgagcgttaggaaaatcttgagttacatggatagatgtagagatctatcagacctagagtctgagcctacatgcatgatggtctatggtgcttcgggtgtaggtaaaacgaccgtcatcaagaaatacttaaatcaaaacagaagagagtccgaagccgggggcgatataataccggttttgcatattgagttgccagacaatgcgaagccagtagatgcagcaagggaattgctggttgaaatgggtgacccgctagcactttatgaaactgacttagctagattgacgaaaagactgactgaattaatccctgcggtcggcgtgaagctgattattatcgatgagttccaacatttggtggaagaaaggtcaaatcgggttcttacccaagtaggtaattggctaaaaatgatacttaacaaaacgaaatgtccaattgttatatttggtatgccatactcaaaagttgtactgcaagcaaactcgcaacttcacgggcgattttccattcaggttgaactgcgcccctttagctaccagggaggtagaggtgtatttaaaacttttttggaataccttgataaagccctaccttttgaaaaacaggctggcttagccaacgaaagtttgcagaaaaaattgtatgcattctctcagggaaacatgcgttcgttgagaaaccttatttatcaagcatctatcgaagcaattgataatcagcatgagacgataaccgaagaagatttcgtttttgcatcgaagttgacatcgggcgataaacccaactcatggaaaaatccttttgaggagggtgttgaggtaacagaagatatgttacgaccgccaccaaaagatattggttgggaggactatttgagacattcaaccccgagagtgagtaaaccaggtagaaataaaaactttttcgaataacctaggctgctgcgctgctgccaccgctgagcaataactagcataaccccttggggcctctaaacgggtcttgaggggttttttgctgaaacctcaggcatttgagaagcacacggtcacactgcttccggtagtcaataaaccggtaaaccagcaatagacataagcggctatttaacgaccctgccctgaaccgacgaccgggtcatcgtggccggatcttgcggcccctcggcttgaacgaattgttagacattatttgccgactaccttggtgatctcgcctttcacgtagtggacaaattcttccaactgatctgcgcgcgaggccaagcgatcttcttcttgtccaagataagcctgtctagcttcaagtatgacgggctgatactgggccggcaggcgctccattgcccagtcggcagcgacatccttcggcgcgattttgccggttactgcgctgtaccaaatgcgggacaacgtaagcactacatttcgctcatcgccagcccagtcgggcggcgagttccatagcgttaaggtttcatttagcgcctcaaatagatcctgttcaggaaccggatcaaagagttcctccgccgctggacctaccaaggcaacgctatgttctcttgcttttgtcagcaagatagccagatcaatgtcgatcgtggctggctcgaagatacctgcaagaatgtcattgcgctgccattctccaaattgcagttcgcgcttagctggataacgccacggaatgatgtcgtcgtgcacaacaatggtgacttctacagcgcggagaatctcgctctctccaggggaagccgaagtttccaaaaggtcgttgatcaaagctcgccgcgttgtttcatcaagccttacggtcaccgtaaccagcaaatcaatatcactgtgtggcttcaggccgccatccactgcggagccgtacaaatgtacggccagcaacgtcggttcgagatggcgctcgatgacgccaactacctctgatagttgagtcgatacttcggcgatcaccgcttccctcatactcttcctttttcaatattattgaagcatttatcagggttattgtctcatgagcggatacatatttgaatgtatttagaaaaataaacaaatagctagctcactcggtcgctacgctccgggcgtgagactgcggcgggcgctgcggacacatacaaagttacccacagattccgtggataagcaggggactaacatgtgaggcaaaacagcagggccgcgccggtggcgtttttccataggctccgccctcctgccagagttcacataaacagacgcttttccggtgcatctgtgggagccgtgaggctcaaccatgaatctgacagtacgggcgaaacccgacaggacttaaagatccccaccgtttccggcgggtcgctccctcttgcgctctcctgttccgaccctgccgtttaccggatacctgttccgcctttctcccttacgggaagtgtggcgctttctcatagctcacacactggtatctcggctcggtgtaggtcgttcgctccaagctgggctgtaagcaagaactccccgttcagcccgactgctgcgccttatccggtaactgttcacttgagtccaacccggaaaagcacggtaaaacgccactggcagcagccattggtaactgggagttcgcagaggatttgtttagctaaacacgcggttgctcttgaagtgtgcgccaaagtccggctacactggaaggacagatttggttgctgtgctctgcgaaagccagttaccacggttaagcagttccccaactgacttaaccttcgatcaaaccacctccccaggtggttttttcgtttacagggcaaaagattacgcgcagaaaaaaaggatctcaagaagatcctttgatcttttctactgaaccgctctagatttcagtgcaatttatctcttcaaatgtagcacctgaagtcagccccatacgatataagttgtaattctcatgttagtcatgccccgcgcccaccggaaggagctgactgggttgaaggctctcaagggcatcggtcgagatcccggtgcctaatgagtgagctaacttacattaattgcgttgcgctcactgcccgctttccagtcgggaaacctgtcgtgccagctgcattaatgaatcggccaacgcgcggggagaggcggtttgcgtattgggcgccagggtggtttttcttttcaccagtgagacgggcaacagctgattgcccttcaccgcctggccctgagagagttgcagcaagcggtccacgctggtttgccccagcaggcgaaaatcctgtttgatggtggttaacggcgggatataacatgagctgtcttcggtatcgtcgtatcccactaccgagatgtccgcaccaacgcgcagcccggactcggtaatggcgcgcattgcgcccagcgccatctgatcgttggcaaccagcatcgcagtgggaacgatgccctcattcagcatttgcatggtttgttgaaaaccggacatggcactccagtcgccttcccgttccgctatcggctgaatttgattgcgagtgagatatttatgccagccagccagacgcagacgcgccgagacagaacttaatgggcccgctaacagcgcgatttgctggtgacccaatgcgaccagatgctccacgcccagtcgcgtaccgtcttcatgggagaaaataatactgttgatgggtgtctggtcagagacatcaagaaataacgccggaacattagtgcaggcagcttccacagcaatggcatcctggtcatccagcggatagttaatgatcagcccactgacgcgttgcgcgagaagattgtgcaccgccgctttacaggcttcgacgccgcttcgttctaccatcgacaccaccacgctggcacccagttgatcggcgcgagatttaatcgccgcgacaatttgcgacggcgcgtgcagggccagactggaggtggcaacgccaatcagcaacgactgtttgcccgccagttgttgtgccacgcggttgggaatgtaattcagctccgccatcgccgcttccactttttcccgcgttttcgcagaaacgtggctggcctggttcaccacgcgggaaacggtctgataagagacaccggcatactctgcgacatcgtataacgttactggtttcac

SEQ ID NO: 259 - DNA, 4798 bp, Artificial Sequence
  Synthetic
ttgcccggcgtcaatacgggataataccgcgccacatagcagaactttaaaagtgctcatcattggaaaacgttcttcggggcgaaaactctcaaggatcttaccgctgttgagatccagttcgatgtaacccactcgtgcacccaactgatcttcagcatcttttactttcaccagcgtttctgggtgagcaaaaacaggaaggcaaaatgccgcaaaaaagggaataagggcgacacggaaatgttgaatactcatactcttcctttttcattattattgaagcatttatcagggttattgtctcatgagcggatacatatttgaatgtatttagaaaaataaacaaataggggttccgcgcacatttccccgaaaagtgccacctgacgtcgacggatcgggagatctcccgatcccctatggtcgactctcagtacaatctgctctgatgccgcatagttaagccagtatctgctccctgcttgtgtgttggaggtcgctgagtagtgcgcgagcaaaatttaagctacaacaaggcaaggcttgaccgacaattgcatgaagaatctgcttagggttaggcgttttgcgctgcttcgcgatgtacgggccagatatacgcgagggcctatttcccatgattccttcatatttgcatatacgatacaaggctgttagagagataattagaattaatttgactgtaaacacaaagatattagtacaaaatacgtgacgtagaaagtaataatttcttgggtagtttgcagttttaaaattatgttttaaaatggactatcatatgcttaccgtaacttgaaagtatttcgatttcttggctttatatatcttgtggaaaggacgaaacaccgtaatacgactcactatagggtctagaattcctgtgacctgccgtataggcagctgaagatgagctgggaccaccttatattcccagggccggtaattctgccgaaaaggcagtgagtagtgtagcggccgctttttttcttctgaggcggaaagaaccagctggggctctagggggtatccccacgcgccctgtagcggcgcattaagcgcggcgggtgtggtggttacgcgcagcgtgaccgctacacttgccagcgccctagcgcccgctcctttcgctttcttcccttcctttctcgccacgttcgccggctttccccgtcaagctctaaatcgggggctccctttagggttccgatttagtgctttacggcacctcgaccccaaaaaacttgattagggtgatggttcacgtagtgggccatcgccctgatagacggtttttcgccctttgacgttggagtccacgttctttaatagtggactcttgttccaaactggaacaacactcaaccctatctcggtctattcttttgatttataagggattttgccgatttcggcctattggttaaaaaatgagctgatttaacaaaaatttaacgcgaattaattctgtggaatgtgtgtcagttagggtgtggaaagtccccaggctccccagcaggcagaagtatgcaaagcatgcatctcaattagtcagcaaccaggtgtggaaagtccccaggctccccagcaggcagaagtatgcaaagcatgcatctcaattagtcagcaaccatagtcccgcccctaactccgcccatcccgcccctaactccgcccagttccgcccattctccgccccatggctgactaattttttttatttatgcagaggccgaggccgcctctgcctctgagctattccagaagtagtgaggaggcttttttggaggcctaggcttttgcaaaaagctcccgggagcttgtatatccattttcggatctgatcaagagacaggatgaggatcgtttcgcatgattgaacaagatggattgcacgcaggttctccggccgcttgggtggagaggctattcggctatgactgggcacaacagacaatcggctgctctgatgccgccgtgttccggctgtcagcgcaggggcgcccggttctttttgtcaagaccgacctgtccggtgccctgaatgaactgcaggacgaggcagcgcggctatcgtggctggccacgacgggcgttccttgcgcagctgtgctcgacgttgtcactgaagcgggaagggactggctgctattgggcgaagtgccggggcaggatctcctgtcatctcaccttgctcctgccgagaaagtatccatcatggctgatgcaatgcggcggctgcatacgcttgatccggctacctgcccattcgaccaccaagcgaaacatcgcatcgagcgagcacgtactcggatggaagccggtcttgtcgatcaggatgatctggacgaagagcatcaggggctcgcgccagccgaactgttcgccaggctcaaggcgcgcatgcccgacggcgaggatctcgtcgtgacccatggcgatgcctgcttgccgaatatcatggtggaaaatggccgcttttctggattcatcgactgtggccggctgggtgtggcggaccgctatcaggacatagcgttggctacccgtgatattgctgaagagcttggcggcgaatgggctgaccgcttcctcgtgctttacggtatcgccgctcccgattcgcagcgcatcgccttctatcgccttcttgacgagttcttctgagcgggactctggggttcgaaatgaccgaccaagcgacgcccaacctgccatcacgagatttcgattccaccgccgccttctatgaaaggttgggcttcggaatcgttttccgggacgccggctggatgatcctccagcgcggggatctcatgctggagttcttcgcccaccccaacttgtttattgcagcttataatggttacaaataaagcaatagcatcacaaatttcacaaataaagcatttttttcactgcattctagttgtggtttgtccaaactcatcaatgtatcttatcatgtctgtataccgtcgacctctagctagagcttggcgtaatcatggtcatagctgtttcctgtgtgaaattgttatccgctcacaattccacacaacatacgagccggaagcataaagtgtaaagcctggggtgcctaatgagtgagctaactcacattaattgcgttgcgctcactgcccgctttccagtcgggaaacctgtcgtgccagctgcattaatgaatcggccaacgcgcggggagaggcggtttgcgtattgggcgctcttccgcttcctcgctcactgactcgctgcgctcggtcgttcggctgcggcgagcggtatcagctcactcaaaggcggtaatacggttatccacagaatcaggggataacgcaggaaagaacatgtgagcaaaaggccagcaaaaggccaggaaccgtaaaaaggccgcgttgctggcgtttttccataggctccgcccccctgacgagcatcacaaaaatcgacgctcaagtcagaggtggcgaaacccgacaggactataaagataccaggcgtttccccctggaagctccctcgtgcgctctcctgttccgaccctgccgcttaccggatacctgtccgcctttctcccttcgggaagcgtggcgctttctcaatgctcacgctgtaggtatctcagttcggtgtaggtcgttcgctccaagctgggctgtgtgcacgaaccccccgttcagcccgaccgctgcgccttatccggtaactatcgtcttgagtccaacccggtaagacacgacttatcgccactggcagcagccactggtaacaggattagcagagcgaggtatgtaggcggtgctacagagttcttgaagtggtggcctaactacggctacactagaaggacagtatttggtatctgcgctctgctgaagccagttaccttcggaaaaagagttggtagctcttgatccggcaaacaaaccaccgctggtagcggtggtttttttgtttgcaagcagcagattacgcgcagaaaaaaaggatctcaagaagatcctttgatcttttctacggggtctgacgctcagtggaacgaaaactcacgttaagggattttggtcatgagattatcaaaaaggatcttcacctagatccttttaaattaaaaatgaagttttaaatcaatctaaagtatatatgagtaaacttggtctgacagttaccaatgcttaatcagtgaggcacctatctcagcgatctgtctatttcgttcatccatagttgcctgactccccgtcgtgtagataactacgatacgggagggcttaccatctggccccagtgctgcaatgataccgcgagacccacgctcaccggctccagatttatcagcaataaaccagccagccggaagggccgagcgcagaagtggtcctgcaactttatccgcctccatccagtctattaattgttgccgggaagctagagtaagtagttcgccagttaatagtttgcgcaacgttgttgccattgctacaggcatcgtggtgtcacgctcgtcgtttggtatggcttcattcagctccggttcccaacgatcaaggcgagttacatgatcccccatgttgtgcaaaaaagcggttagctccttcggtcctccgatcgttgtcagaagtaagttggccgcagtgttatcactcatggttatggcagcactgcataattctcttactgtcatgccatccgtaagatgcttttctgtgactggtgagtactcaaccaagtcattctgagaatagtgtatgcggcgaccgagttgctc

SEQ ID NO: 260 - DNA, 4798 bp, Artificial Sequence
  Synthetic
ttgcccggcgtcaatacgggataataccgcgccacatagcagaactttaaaagtgctcatcattggaaaacgttcttcggggcgaaaactctcaaggatcttaccgctgttgagatccagttcgatgtaacccactcgtgcacccaactgatcttcagcatcttttactttcaccagcgtttctgggtgagcaaaaacaggaaggcaaaatgccgcaaaaaagggaataagggcgacacggaaatgttgaatactcatactcttcctttttcattattattgaagcatttatcagggttattgtctcatgagcggatacatatttgaatgtatttagaaaaataaacaaataggggttccgcgcacatttccccgaaaagtgccacctgacgtcgacggatcgggagatctcccgatcccctatggtcgactctcagtacaatctgctctgatgccgcatagttaagccagtatctgctccctgcttgtgtgttggaggtcgctgagtagtgcgcgagcaaaatttaagctacaacaaggcaaggcttgaccgacaattgcatgaagaatctgcttagggttaggcgttttgcgctgcttcgcgatgtacgggccagatatacgcgagggcctatttcccatgattccttcatatttgcatatacgatacaaggctgttagagagataattagaattaatttgactgtaaacacaaagatattagtacaaaatacgtgacgtagaaagtaataatttcttgggtagtttgcagttttaaaattatgttttaaaatggactatcatatgcttaccgtaacttgaaagtatttcgatttcttggctttatatatcttgtggaaaggacgaaacaccgtaatacgactcactatagggtctagaattcctgtgacctgccgtataggcagctgaagatacagtggggccactagggacaggattggtgactaattctgccgaaaaggcagtgagtagtgtagcggccgctttttttcttctgaggcggaaagaaccagctggggctctagggggtatccccacgcgccctgtagcggcgcattaagcgcggcgggtgtggtggttacgcgcagcgtgaccgctacacttgccagcgccctagcgcccgctcctttcgctttcttcccttcctttctcgccacgttcgccggctttccccgtcaagctctaaatcgggggctccctttagggttccgatttagtgctttacggcacctcgaccccaaaaaacttgattagggtgatggttcacgtagtgggccatcgccctgatagacggtttttcgccctttgacgttggagtccacgttctttaatagtggactcttgttccaaactggaacaacactcaaccctatctcggtctattcttttgatttataagggattttgccgatttcggcctattggttaaaaaatgagctgatttaacaaaaatttaacgcgaattaattctgtggaatgtgtgtcagttagggtgtggaaagtccccaggctccccagcaggcagaagtatgcaaagcatgcatctcaattagtcagcaaccaggtgtggaaagtccccaggctccccagcaggcagaagtatgcaaagcatgcatctcaattagtcagcaaccatagtcccgcccctaactccgcccatcccgcccctaactccgcccagttccgcccattctccgccccatggctgactaattttttttatttatgcagaggccgaggccgcctctgcctctgagctattccagaagtagtgaggaggcttttttggaggcctaggcttttgcaaaaagctcccgggagcttgtatatccattttcggatctgatcaagagacaggatgaggatcgtttcgcatgattgaacaagatggattgcacgcaggttctccggccgcttgggtggagaggctattcggctatgactgggcacaacagacaatcggctgctctgatgccgccgtgttccggctgtcagcgcaggggcgcccggttctttttgtcaagaccgacctgtccggtgccctgaatgaactgcaggacgaggcagcgcggctatcgtggctggccacgacgggcgttccttgcgcagctgtgctcgacgttgtcactgaagcgggaagggactggctgctattgggcgaagtgccggggcaggatctcctgtcatctcaccttgctcctgccgagaaagtatccatcatggctgatgcaatgcggcggctgcatacgcttgatccggctacctgcccattcgaccaccaagcgaaacatcgcatcgagcgagcacgtactcggatggaagccggtcttgtcgatcaggatgatctggacgaagagcatcaggggctcgcgccagccgaactgttcgccaggctcaaggcgcgcatgcccgacggcgaggatctcgtcgtgacccatggcgatgcctgcttgccgaatatcatggtggaaaatggccgcttttctggattcatcgactgtggccggctgggtgtggcggaccgctatcaggacatagcgttggctacccgtgatattgctgaagagcttggcggcgaatgggctgaccgcttcctcgtgctttacggtatcgccgctcccgattcgcagcgcatcgccttctatcgccttcttgacgagttcttctgagcgggactctggggttcgaaatgaccgaccaagcgacgcccaacctgccatcacgagatttcgattccaccgccgccttctatgaaaggttgggcttcggaatcgttttccgggacgccggctggatgatcctccagcgcggggatctcatgctggagttcttcgcccaccccaacttgtttattgcagcttataatggttacaaataaagcaatagcatcacaaatttcacaaataaagcatttttttcactgcattctagttgtggtttgtccaaactcatcaatgtatcttatcatgtctgtataccgtcgacctctagctagagcttggcgtaatcatggtcatagctgtttcctgtgtgaaattgttatccgctcacaattccacacaacatacgagccggaagcataaagtgtaaagcctggggtgcctaatgagtgagctaactcacattaattgcgttgcgctcactgcccgctttccagtcgggaaacctgtcgtgccagctgcattaatgaatcggccaacgcgcggggagaggcggtttgcgtattgggcgctcttccgcttcctcgctcactgactcgctgcgctcggtcgttcggctgcggcgagcggtatcagctcactcaaaggcggtaatacggttatccacagaatcaggggataacgcaggaaagaacatgtgagcaaaaggccagcaaaaggccaggaaccgtaaaaaggccgcgttgctggcgtttttccataggctccgcccccctgacgagcatcacaaaaatcgacgctcaagtcagaggtggcgaaacccgacaggactataaagataccaggcgtttccccctggaagctccctcgtgcgctctcctgttccgaccctgccgcttaccggatacctgtccgcctttctcccttcgggaagcgtggcgctttctcaatgctcacgctgtaggtatctcagttcggtgtaggtcgttcgctccaagctgggctgtgtgcacgaaccccccgttcagcccgaccgctgcgccttatccggtaactatcgtcttgagtccaacccggtaagacacgacttatcgccactggcagcagccactggtaacaggattagcagagcgaggtatgtaggcggtgctacagagttcttgaagtggtggcctaactacggctacactagaaggacagtatttggtatctgcgctctgctgaagccagttaccttcggaaaaagagttggtagctcttgatccggcaaacaaaccaccgctggtagcggtggtttttttgtttgcaagcagcagattacgcgcagaaaaaaaggatctcaagaagatcctttgatcttttctacggggtctgacgctcagtggaacgaaaactcacgttaagggattttggtcatgagattatcaaaaaggatcttcacctagatccttttaaattaaaaatgaagttttaaatcaatctaaagtatatatgagtaaacttggtctgacagttaccaatgcttaatcagtgaggcacctatctcagcgatctgtctatttcgttcatccatagttgcctgactccccgtcgtgtagataactacgatacgggagggcttaccatctggccccagtgctgcaatgataccgcgagacccacgctcaccggctccagatttatcagcaataaaccagccagccggaagggccgagcgcagaagtggtcctgcaactttatccgcctccatccagtctattaattgttgccgggaagctagagtaagtagttcgccagttaatagtttgcgcaacgttgttgccattgctacaggcatcgtggtgtcacgctcgtcgtttggtatggcttcattcagctccggttcccaacgatcaaggcgagttacatgatcccccatgttgtgcaaaaaagcggttagctccttcggtcctccgatcgttgtcagaagtaagttggccgcagtgttatcactcatggttatggcagcactgcataattctcttactgtcatgccatccgtaagatgcttttctgtgactggtgagtactcaaccaagtcattctgagaatagtgtatgcggcgaccgagttgctc

SEQ ID NO: 261 - DNA, 10803 bp, Artificial Sequence
  Synthetic
gacggatcgggagatctcccgatcccctatggtgcactctcagtacaatctgctctgatgccgcatagttaagccagtatctgctccctgcttgtgtgttggaggtcgctgagtagtgcgcgagcaaaatttaagctacaacaaggcaaggcttgaccgacaattgcatgaagaatctgcttagggttaggcgttttgcgctgcttcgcgatgtacgggccagatatacgcgttgacattgattattgactagttattaatagtaatcaattacggggtcattagttcatagcccatatatggagttccgcgttacataacttacggtaaatggcccgcctggctgaccgcccaacgacccccgcccattgacgtcaataatgacgtatgttcccatagtaacgccaatagggactttccattgacgtcaatgggtggagtatttacggtaaactgcccacttggcagtacatcaagtgtatcatatgccaagtacgccccctattgacgtcaatgacggtaaatggcccgcctggcattatgcccagtacatgaccttatgggactttcctacttggcagtacatctacgtattagtcatcgctattaccatggtgatgcggttttggcagtacatcaatgggcgtggatagcggtttgactcacggggatttccaagtctccaccccattgacgtcaatgggagtttgttttggcaccaaaatcaacgggactttccaaaatgtcgtaacaactccgccccattgacgcaaatgggcggtaggcgtgtacggtgggaggtctatataagcagagctctctggctaactagagaacccactgcttactggcttatcgaaattaatacgactcactatagggagacccaagctggctagcgtttaaacttaagcttgccaccatggagctgtgcaacatcctgaagtacgacaggtctctgtatcccggcaaggccgtgttcttttacaagaccgccgacagcgattttgtgccactggaggccgatatcaacaagatcaggggaccaaagagcggcttcaccgaggcctttacacctcagttctctccaaagaatatcagccctcaggacctgacccacaacaatatcctgacactggaggagtgctatgtgccccctaacgtggagcacatcttctgtaggttttctctgcgcgtgcaggccaatagcctggtgcccagcggctgctccgatcctgaggtgttttccctgctgaaggagctggccgagaccttcaaggagtgcggaggatacaaggagctggccgtgcggtattgtagaaacatcctgatcggcacatggctgtggcggaaccagaataccggcaatacacagatcgagatcaagacctctaagggcagctgttacctgatcgacaacacaagaaagctggcctgggagagcaagtgggcctccgacgatctgaaggtgctggaggagctgtccaacgagatcgagtctgccctgaccgaccctaacgtgttctggagcgccgatatcacagccaagatcgaggcctccttctgccaggaaatctacccatctcagatcctgaacgacaaggtgaagcagggcgaggcctccaagcagtttgtgaaggccaagtgtgccgatggccggtatgccgtgtccttcaattctgtgaagatcggcgccgccctgcagagcatcgacgattggtgggacgaggatgcctccaagaggctgcgcgtgcacgagttcggagcagacaaggagatcggagtggcacggagaccacccgatagcgagcagaacttttactccatcttcaagaataccgagtggtatctgtccgccctgaagaattgtatcacaaacaagaatgagaagatcgatcccgccatctactatctgttttctgtgctgatcaagggcggcatgttccagaagaaggccgaggccaagaaggccggctccggaaaaagaaccgccgacggcagcgaattcgagtcacccaagaagaagaggaaagtcgggtcctccgagggaaggggctctctgctgacctgcggcgacgtggaggagaaccctggacccggaatgggccacctgaaggagctgctggagatcaccgacaccacagagagggatcgctccctgcggagagccttctctccctacaccgccatgatcgacatcacaggctccgaggccgtggccctgatcatcctgctgaatctgacatatcgcaagaaccaggtggacgatctgctggacaagaagctggccaagcaggccctgaagagcgaggatcacatcaacaagtgcatcaaggagatcgcctggtttcacacccacaatctgaagtacccagatatccgggtgtccaagcagaacctggccgtggagccccctacactgcactcttatgtgctgagctccgccaattaccccaaggcctatggctggagccacaattccgccaaggtgaactttgccaagctgttcgtgagctactttaagtggcagaaccaggtgtcctggctggcccaggtgctggccaccaatagcgacaactggaagtctgccttcacaagcctgggcctgtccgtgaaggccttcaagagcctgtgcgtgaccgtgaagaatagcctgcctgaggaggccatcccagactccgtggataggtattctcgccagatcagaatgccataccacgacggctatctggccgtgacccccgtgatcagccacgtggtgcagtccaagatccagcaggccgccatcgataagcgggccagattctccaacgtggagtttacacgcccagcagccgtgtctatgctggccgccagcctgggaggcgtgatcaatgtgctgaactacccaccctatatcagaagcaagtaccacggcctgtctaatagcagggccttcaagctgaacaatggccagaccgtgtttaacgtggaggccctgctgaagcctgagctgatcaaggccctggagggcatcatcttctccaacaatgccctggccctgaagcagaggcgccagcagaaggtgaagaatatcaaggagctgcgcaacacactgctggagtggttctctccagtgtttgagtggcggctggacgccatcgagaatggctacgatctggagcagctggagtccgcctctgagagactggagtataagatcctgtccctgcccgacaatgagctgccttctctgaccatcccactgttcagactgctgaacgagatgctgggcggcgtgagcatgacacagaggtacgcctttcaccccaagctgatgtcccctctgaaggccgccctgcagtggctgctggtgaatctgaccgaccagaagcacgtgctgatcgaggaggacgatgagcactacagatatctgcacctgtccggcatcagggtgtttgatgcccaggccctgtctaacccatactgctctggcatccccagcctgacagccgtgtggggaatgatccactcttatcagaggaagctgaatgaggccctgggcaccaacgtgcggttcaccagcttcagctggttcatcagaaactacagcgccgtggcaggcaagaagctgcccgagctgagcctgcagggagcacagcagtccagactgaagaggcctggcatcatcgacggcaagtactgtgacctggtgttcgatctgatcatccacatcgatggctatgaggacgatctgcaggccgtggacagcaagcctgatatcctgaaggcccacttcccatccaattttgcaggaggcgtgatgcaccagccagagctgaactctaatatcaactggtgctgtctgtatagcaatgagaaccagctgtttgagaagctgcggagactgcccctgtccggctgctgggtcatgcctaccgagcacaagatccaggacctggatgagctgctgctgctgctgaactctgacagcaagctgtccccttctatgatgggctacatgctgctgaccgagccaatggcccgcgtgggcagcctggagcggctgcactgttacgccgagcctgccatcggcgtggtgaagtatgaggccgccacatctgtgaggctgaagggcatcggcaattatttcaacagcgccttttggatgctggatgcccaggagaagttcatgctgatgaagaaggtgggaagcggcaagcggactgctgatggcagtgaatttgagtccccaaagaagaagagaaaggtgggctcgagcgagggaaggggctccctgctgacttgtggcgacgtggaggagaaccctggccccagcatgggccagagatactactttaccgtgcatttcctgcctaaacaagccaatctggccctgctgacaggcagatgcatcagcatcatgcacggctttatcctgaagcacaacatcgagggaatgggcgttaccttcccagcctggtccgacagcagcatcggcaacgaaattgccttcgtgtacaccgacaaggaaatcctcaacacactgaaggaccaggcctacttcgtggatatgcaggattgcggcttcttcaaggtctcccaagtgctggctgtgcccgattcttgcgaggaagtgcggttcatccggaaccaggccgtggccaaaatcttcaccggagagagcagaagaaggctgaaaagactgcagaagagagccctggccagaggcgaagatttcaaccccaagaagatcgaggcccctcgggaaatcgatatcttccacagagtggccatgaccagcaagagctctcaggaggactacatcctgcacatccagaaacaggacgtggactgtcaggctgagccttactttagcaattacggcctggccagcaacgagaagttcaagggaacagtgcctgacctgagccccagcatcgacagaaacgggtctggaaagcgcaccgccgatggttccgagttcgaaagccccaaaaaaaagcgcaaggtcggtagctccgagggaagaggctccctgctgacatgtggcgacgtggaagaaaaccctggacctggcaaacggacagccgacggaagcgagttcgagtcaccgaaaaagaagcgaaaagttggctccggaatggccttcctgttttctcccaaggcccgggcctttagcgacgagtccctggagtcttatctgctgagagtggtgagcgagaatttctttgatagctacgagggcctgtccctggccatcagggaggagctgcacgagctggactttgaggcacacggagcattcccagtggacctgaagcggctgaacgtgtaccacgccaagcacaactctcacttcagaatgagagccctgggactgctggagaccctgctggacctgccccggtatgagctgcagaagctggccctgctgaagagcgatatcaagtttaacagctccgtggccctgtacaacaatggcgtggacatccctctgaggttcatcaggcaccacgcagaggaggcagtggattctatcccagtgtgcagccagtgtctggccgaggaggcctacatcaagcagtcctggcacatcaagtgggtgaatgcctgcaccaagcaccagtgtgccctgctgcacaactgccccgagtgttacgcccctatcaactatatcgagaatgagtccatcacacactgctcttgtggctttgagctgagctgcgcctctaccagccccgtgaatacactgtccatcgagcacctgaacaagctgctggacaagggcgagaggaacgattccaatcctctgtttaacaatatgaccctgacagagaggttcgccgccctgctgtggtatcaggagcggtactctcagaccgacaacttctgcctgaatgatgccgtgaactactttagcaagtggcctgccgtgttcaatacagagctggacgagctgtccaagaacgccgagatgaagctgatcgatctgtttaacaagaccgagttcaagtttatcttcggcgacgccatcctggcctgtccaagcacacagaagcagtccgagtctcacttcatctacagggccctgctggactatctggtgaccctggtggagtccaatccaaagacaaagaagcccaacgccgccgatctgctggtgtctgtgctggaggcagccaccctgctgggcacaagcgtggagcaggtgtaccgcctgtatcagaatggcatcctgcagaccgcctttcggcacaagatgaatcagagaatcaacccttacaagggcgccttctttctgaggcacgtgatcgagtataagacatccttcggcaacgataaggcccgcatgtacctgtctgcctggtgagcggccgctcgagtctagagggcccgtttaaacccgctgatcagcctcgactgtgccttctagttgccagccatctgttgtttgcccctcccccgtgccttccttgaccctggaaggtgccactcccactgtcctttcctaataaaatgaggaaattgcatcgcattgtctgagtaggtgtcattctattctggggggtggggtggggcaggacagcaagggggaggattgggaagacaatagcaggcatgctggggatgcggtgggctctatggcttctgaggcggaaagaaccagctggggctctagggggtatccccacgcgccctgtagcggcgcattaagcgcggcgggtgtggtggttacgcgcagcgtgaccgctacacttgccagcgccctagcgcccgctcctttcgctttcttcccttcctttctcgccacgttcgccggctttccccgtcaagctctaaatcgggggctccctttagggttccgatttagtgctttacggcacctcgaccccaaaaaacttgattagggtgatggttcacgtagtgggccatcgccctgatagacggtttttcgccctttgacgttggagtccacgttctttaatagtggactcttgttccaaactggaacaacactcaaccctatctcggtctattcttttgatttataagggattttgccgatttcggcctattggttaaaaaatgagctgatttaacaaaaatttaacgcgaattaattctgtggaatgtgtgtcagttagggtgtggaaagtccccaggctccccagcaggcagaagtatgcaaagcatgcatctcaattagtcagcaaccaggtgtggaaagtccccaggctccccagcaggcagaagtatgcaaagcatgcatctcaattagtcagcaaccatagtcccgcccctaactccgcccatcccgcccctaactccgcccagttccgcccattctccgccccatggctgactaattttttttatttatgcagaggccgaggccgcctctgcctctgagctattccagaagtagtgaggaggcttttttggaggcctaggcttttgcaaaaagctcccgggagcttgtatatccattttcggatctgatcaagagacaggatgaggatcgtttcgcatgattgaacaagatggattgcacgcaggttctccggccgcttgggtggagaggctattcggctatgactgggcacaacagacaatcggctgctctgatgccgccgtgttccggctgtcagcgcaggggcgcccggttctttttgtcaagaccgacctgtccggtgccctgaatgaactgcaggacgaggcagcgcggctatcgtggctggccacgacgggcgttccttgcgcagctgtgctcgacgttgtcactgaagcgggaagggactggctgctattgggcgaagtgccggggcaggatctcctgtcatctcaccttgctcctgccgagaaagtatccatcatggctgatgcaatgcggcggctgcatacgcttgatccggctacctgcccattcgaccaccaagcgaaacatcgcatcgagcgagcacgtactcggatggaagccggtcttgtcgatcaggatgatctggacgaagagcatcaggggctcgcgccagccgaactgttcgccaggctcaaggcgcgcatgcccgacggcgaggatctcgtcgtgacccatggcgatgcctgcttgccgaatatcatggtggaaaatggccgcttttctggattcatcgactgtggccggctgggtgtggcggaccgctatcaggacatagcgttggctacccgtgatattgctgaagagcttggcggcgaatgggctgaccgcttcctcgtgctttacggtatcgccgctcccgattcgcagcgcatcgccttctatcgccttcttgacgagttcttctgagcgggactctggggttcgaaatgaccgaccaagcgacgcccaacctgccatcacgagatttcgattccaccgccgccttctatgaaaggttgggcttcggaatcgttttccgggacgccggctggatgatcctccagcgcggggatctcatgctggagttcttcgcccaccccaacttgtttattgcagcttataatggttacaaataaagcaatagcatcacaaatttcacaaataaagcatttttttcactgcattctagttgtggtttgtccaaactcatcaatgtatcttatcatgtctgtataccgtcgacctctagctagagcttggcgtaatcatggtcatagctgtttcctgtgtgaaattgttatccgctcacaattccacacaacatacgagccggaagcataaagtgtaaagcctggggtgcctaatgagtgagctaactcacattaattgcgttgcgctcactgcccgctttccagtcgggaaacctgtcgtgccagctgcattaatgaatcggccaacgcgcggggagaggcggtttgcgtattgggcgctcttccgcttcctcgctcactgactcgctgcgctcggtcgttcggctgcggcgagcggtatcagctcactcaaaggcggtaatacggttatccacagaatcaggggataacgcaggaaagaacatgtgagcaaaaggccagcaaaaggccaggaaccgtaaaaaggccgcgttgctggcgtttttccataggctccgcccccctgacgagcatcacaaaaatcgacgctcaagtcagaggtggcgaaacccgacaggactataaagataccaggcgtttccccctggaagctccctcgtgcgctctcctgttccgaccctgccgcttaccggatacctgtccgcctttctcccttcgggaagcgtggcgctttctcatagctcacgctgtaggtatctcagttcggtgtaggtcgttcgctccaagctgggctgtgtgcacgaaccccccgttcagcccgaccgctgcgccttatccggtaactatcgtcttgagtccaacccggtaagacacgacttatcgccactggcagcagccactggtaacaggattagcagagcgaggtatgtaggcggtgctacagagttcttgaagtggtggcctaactacggctacactagaagaacagtatttggtatctgcgctctgctgaagccagttaccttcggaaaaagagttggtagctcttgatccggcaaacaaaccaccgctggtagcggtttttttgtttgcaagcagcagattacgcgcagaaaaaaaggatctcaagaagatcctttgatcttttctacggggtctgacgctcagtggaacgaaaactcacgttaagggattttggtcatgagattatcaaaaaggatcttcacctagatccttttaaattaaaaatgaagttttaaatcaatctaaagtatatatgagtaaacttggtctgacagttaccaatgcttaatcagtgaggcacctatctcagcgatctgtctatttcgttcatccatagttgcctgactccccgtcgtgtagataactacgatacgggagggcttaccatctggccccagtgctgcaatgataccgcgagacccacgctcaccggctccagatttatcagcaataaaccagccagccggaagggccgagcgcagaagtggtcctgcaactttatccgcctccatccagtctattaattgttgccgggaagctagagtaagtagttcgccagttaatagtttgcgcaacgttgttgccattgctacaggcatcgtggtgtcacgctcgtcgtttggtatggcttcattcagctccggttcccaacgatcaaggcgagttacatgatcccccatgttgtgcaaaaaagcggttagctccttcggtcctccgatcgttgtcagaagtaagttggccgcagtgttatcactcatggttatggcagcactgcataattctcttactgtcatgccatccgtaagatgcttttctgtgactggtgagtactcaaccaagtcattctgagaatagtgtatgcggcgaccgagttgctcttgcccggcgtcaatacgggataataccgcgccacatagcagaactttaaaagtgctcatcattggaaaacgttcttcggggcgaaaactctcaaggatcttaccgctgttgagatccagttcgatgtaacccactcgtgcacccaactgatcttcagcatcttttactttcaccagcgtttctgggtgagcaaaaacaggaaggcaaaatgccgcaaaaaagggaataagggcgacacggaaatgttgaatactcatactcttcctttttcaatattattgaagcatttatcagggttattgtctcatgagcggatacatatttgaatgtatttagaaaaataaacaaataggggttccgcgcacatttccccgaaaagtgccacctgacgtc

SEQ ID NO: 262 - DNA, 10800 bp, Artificial Sequence
  Synthetic
gacggatcgggagatctcccgatcccctatggtgcactctcagtacaatctgctctgatgccgcatagttaagccagtatctgctccctgcttgtgtgttggaggtcgctgagtagtgcgcgagcaaaatttaagctacaacaaggcaaggcttgaccgacaattgcatgaagaatctgcttagggttaggcgttttgcgctgcttcgcgatgtacgggccagatatacgcgttgacattgattattgactagttattaatagtaatcaattacggggtcattagttcatagcccatatatggagttccgcgttacataacttacggtaaatggcccgcctggctgaccgcccaacgacccccgcccattgacgtcaataatgacgtatgttcccatagtaacgccaatagggactttccattgacgtcaatgggtggagtatttacggtaaactgcccacttggcagtacatcaagtgtatcatatgccaagtacgccccctattgacgtcaatgacggtaaatggcccgcctggcattatgcccagtacatgaccttatgggactttcctacttggcagtacatctacgtattagtcatcgctattaccatggtgatgcggttttggcagtacatcaatgggcgtggatagcggtttgactcacggggatttccaagtctccaccccattgacgtcaatgggagtttgttttggcaccaaaatcaacgggactttccaaaatgtcgtaacaactccgccccattgacgcaaatgggcggtaggcgtgtacggtgggaggtctatataagcagagctctctggctaactagagaacccactgcttactggcttatcgaaattaatacgactcactatagggagacccaagctggctagcgtttaaacttaagcttgccaccatggagctgtgcaacatcctgaagtacgacaggtctctgtatcccggcaaggccgtgttcttttacaagaccgccgacagcgattttgtgccactggaggccgatatcaacaagatcaggggaccaaagagcggcttcaccgaggcctttacacctcagttctctccaaagaatatcagccctcaggacctgacccacaacaatatcctgacactggaggagtgctatgtgccccctaacgtggagcacatcttctgtaggttttctctgcgcgtgcaggccaatagcctggtgcccagcggctgctccgatcctgaggtgttttccctgctgaaggagctggccgagaccttcaaggagtgcggaggatacaaggagctggccgtgcggtattgtagaaacatcctgatcggcacatggctgtggcggaaccagaataccggcaatacacagatcgagatcaagacctctaagggcagctgttacctgatcgacaacacaagaaagctggcctgggagagcaagtgggcctccgacgatctgaaggtgctggaggagctgtccaacgagatcgagtctgccctgaccgaccctaacgtgttctggagcgccgatatcacagccaagatcgaggcctccttctgccaggaaatctacccatctcagatcctgaacgacaaggtgaagcagggcgaggcctccaagcagtttgtgaaggccaagtgtgccgatggccggtatgccgtgtccttcaattctgtgaagatcggcgccgccctgcagagcatcgacgattggtgggacgaggatgcctccaagaggctgcgcgtgcacgagttcggagcagacaaggagatcggagtggcacggagaccacccgatagcgagcagaacttttactccatcttcaagaataccgagtggtatctgtccgccctgaagaattgtatcacaaacaagaatgagaagatcgatcccgccatctactatctgttttctgtgctgatcaagggcggcatgttccagaagaaggccgaggccaagaaggccggctccggaaaaagaaccgccgacggcagcgaattcgagtcacccaagaagaagaggaaagtcgggtcctccgagggaaggggctctctgctgacctgcggcgacgtggaggagaaccctggacccggaatgggccagagatactactttaccgtgcatttcctgcctaaacaagccaatctggccctgctgacaggcagatgcatcagcatcatgcacggctttatcctgaagcacaacatcgagggaatgggcgttaccttcccagcctggtccgacagcagcatcggcaacgaaattgccttcgtgtacaccgacaaggaaatcctcaacacactgaaggaccaggcctacttcgtggatatgcaggattgcggcttcttcaaggtctcccaagtgctggctgtgcccgattcttgcgaggaagtgcggttcatccggaaccaggccgtggccaaaatcttcaccggagagagcagaagaaggctgaaaagactgcagaagagagccctggccagaggcgaagatttcaaccccaagaagatcgaggcccctcgggaaatcgatatcttccacagagtggccatgaccagcaagagctctcaggaggactacatcctgcacatccagaaacaggacgtggactgtcaggctgagccttactttagcaattacggcctggccagcaacgagaagttcaagggaacagtgcctgacctgagccccagcatcgacagaaacggaagcggcaagcggactgctgatggcagtgaatttgagtccccaaagaagaagagaaaggtgggctcgagcgagggaaggggctccctgctgacttgtggcgacgtggaggagaaccctggccccagcatgcacctgaaggagctgctggagatcaccgacaccacagagagggatcgctccctgcggagagccttctctccctacaccgccatgatcgacatcacaggctccgaggccgtggccctgatcatcctgctgaatctgacatatcgcaagaaccaggtggacgatctgctggacaagaagctggccaagcaggccctgaagagcgaggatcacatcaacaagtgcatcaaggagatcgcctggtttcacacccacaatctgaagtacccagatatccgggtgtccaagcagaacctggccgtggagccccctacactgcactcttatgtgctgagctccgccaattaccccaaggcctatggctggagccacaattccgccaaggtgaactttgccaagctgttcgtgagctactttaagtggcagaaccaggtgtcctggctggcccaggtgctggccaccaatagcgacaactggaagtctgccttcacaagcctgggcctgtccgtgaaggccttcaagagcctgtgcgtgaccgtgaagaatagcctgcctgaggaggccatcccagactccgtggataggtattctcgccagatcagaatgccataccacgacggctatctggccgtgacccccgtgatcagccacgtggtgcagtccaagatccagcaggccgccatcgataagcgggccagattctccaacgtggagtttacacgcccagcagccgtgtctatgctggccgccagcctgggaggcgtgatcaatgtgctgaactacccaccctatatcagaagcaagtaccacggcctgtctaatagcagggccttcaagctgaacaatggccagaccgtgtttaacgtggaggccctgctgaagcctgagctgatcaaggccctggagggcatcatcttctccaacaatgccctggccctgaagcagaggcgccagcagaaggtgaagaatatcaaggagctgcgcaacacactgctggagtggttctctccagtgtttgagtggcggctggacgccatcgagaatggctacgatctggagcagctggagtccgcctctgagagactggagtataagatcctgtccctgcccgacaatgagctgccttctctgaccatcccactgttcagactgctgaacgagatgctgggcggcgtgagcatgacacagaggtacgcctttcaccccaagctgatgtcccctctgaaggccgccctgcagtggctgctggtgaatctgaccgaccagaagcacgtgctgatcgaggaggacgatgagcactacagatatctgcacctgtccggcatcagggtgtttgatgcccaggccctgtctaacccatactgctctggcatccccagcctgacagccgtgtggggaatgatccactcttatcagaggaagctgaatgaggccctgggcaccaacgtgcggttcaccagcttcagctggttcatcagaaactacagcgccgtggcaggcaagaagctgcccgagctgagcctgcagggagcacagcagtccagactgaagaggcctggcatcatcgacggcaagtactgtgacctggtgttcgatctgatcatccacatcgatggctatgaggacgatctgcaggccgtggacagcaagcctgatatcctgaaggcccacttcccatccaattttgcaggaggcgtgatgcaccagccagagctgaactctaatatcaactggtgctgtctgtatagcaatgagaaccagctgtttgagaagctgcggagactgcccctgtccggctgctgggtcatgcctaccgagcacaagatccaggacctggatgagctgctgctgctgctgaactctgacagcaagctgtccccttctatgatgggctacatgctgctgaccgagccaatggcccgcgtgggcagcctggagcggctgcactgttacgccgagcctgccatcggcgtggtgaagtatgaggccgccacatctgtgaggctgaagggcatcggcaattatttcaacagcgccttttggatgctggatgcccaggagaagttcatgctgatgaagaaggtggggtctggaaagcgcaccgccgatggttccgagttcgaaagccccaaaaaaaagcgcaaggtcggtagctccgagggaagaggctccctgctgacatgtggcgacgtggaagaaaaccctggacctggcaaacggacagccgacggaagcgagttcgagtcaccgaaaaagaagcgaaaagttggctccggaatggccttcctgttttctcccaaggcccgggcctttagcgacgagtccctggagtcttatctgctgagagtggtgagcgagaatttctttgatagctacgagggcctgtccctggccatcagggaggagctgcacgagctggactttgaggcacacggagcattcccagtggacctgaagcggctgaacgtgtaccacgccaagcacaactctcacttcagaatgagagccctgggactgctggagaccctgctggacctgccccggtatgagctgcagaagctggccctgctgaagagcgatatcaagtttaacagctccgtggccctgtacaacaatggcgtggacatccctctgaggttcatcaggcaccacgcagaggaggcagtggattctatcccagtgtgcagccagtgtctggccgaggaggcctacatcaagcagtcctggcacatcaagtgggtgaatgcctgcaccaagcaccagtgtgccctgctgcacaactgccccgagtgttacgcccctatcaactatatcgagaatgagtccatcacacactgctcttgtggctttgagctgagctgcgcctctaccagccccgtgaatacactgtccatcgagcacctgaacaagctgctggacaagggcgagaggaacgattccaatcctctgtttaacaatatgaccctgacagagaggttcgccgccctgctgtggtatcaggagcggtactctcagaccgacaacttctgcctgaatgatgccgtgaactactttagcaagtggcctgccgtgttcaatacagagctggacgagctgtccaagaacgccgagatgaagctgatcgatctgtttaacaagaccgagttcaagtttatcttcggcgacgccatcctggcctgtccaagcacacagaagcagtccgagtctcacttcatctacagggccctgctggactatctggtgaccctggtggagtccaatccaaagacaaagaagcccaacgccgccgatctgctggtgtctgtgctggaggcagccaccctgctgggcacaagcgtggagcaggtgtaccgcctgtatcagaatggcatcctgcagaccgcctttcggcacaagatgaatcagagaatcaacccttacaagggcgccttctttctgaggcacgtgatcgagtataagacatccttcggcaacgataaggcccgcatgtacctgtctgcctggtgagcggccgctcgagtctagagggcccgtttaaacccgctgatcagcctcgactgtgccttctagttgccagccatctgttgtttgcccctcccccgtgccttccttgaccctggaaggtgccactcccactgtcctttcctaataaaatgaggaaattgcatcgcattgtctgagtaggtgtcattctattctggggggtggggtggggcaggacagcaagggggaggattgggaagacaatagcaggcatgctggggatgcggtgggctctatggcttctgaggcggaaagaaccagctggggctctagggggtatccccacgcgccctgtagcggcgcattaagcgcggcgggtgtggtggttacgcgcagcgtgaccgctacacttgccagcgccctagcgcccgctcctttcgctttcttcccttcctttctcgccacgttcgccggctttccccgtcaagctctaaatcgggggctccctttagggttccgatttagtgctttacggcacctcgaccccaaaaaacttgattagggtgatggttcacgtagtgggccatcgccctgatagacggtttttcgccctttgacgttggagtccacgttctttaatagtggactcttgttccaaactggaacaacactcaaccctatctcggtctattcttttgatttataagggattttgccgatttcggcctattggttaaaaaatgagctgatttaacaaaaatttaacgcgaattaattctgtggaatgtgtgtcagttagggtgtggaaagtccccaggctccccagcaggcagaagtatgcaaagcatgcatctcaattagtcagcaaccaggtgtggaaagtccccaggctccccagcaggcagaagtatgcaaagcatgcatctcaattagtcagcaaccatagtcccgcccctaactccgcccatcccgcccctaactccgcccagttccgcccattctccgccccatggctgactaattttttttatttatgcagaggccgaggccgcctctgcctctgagctattccagaagtagtgaggaggcttttttggaggcctaggcttttgcaaaaagctcccgggagcttgtatatccattttcggatctgatcaagagacaggatgaggatcgtttcgcatgattgaacaagatggattgcacgcaggttctccggccgcttgggtggagaggctattcggctatgactgggcacaacagacaatcggctgctctgatgccgccgtgttccggctgtcagcgcaggggcgcccggttctttttgtcaagaccgacctgtccggtgccctgaatgaactgcaggacgaggcagcgcggctatcgtggctggccacgacgggcgttccttgcgcagctgtgctcgacgttgtcactgaagcgggaagggactggctgctattgggcgaagtgccggggcaggatctcctgtcatctcaccttgctcctgccgagaaagtatccatcatggctgatgcaatgcggcggctgcatacgcttgatccggctacctgcccattcgaccaccaagcgaaacatcgcatcgagcgagcacgtactcggatggaagccggtcttgtcgatcaggatgatctggacgaagagcatcaggggctcgcgccagccgaactgttcgccaggctcaaggcgcgcatgcccgacggcgaggatctcgtcgtgacccatggcgatgcctgcttgccgaatatcatggtggaaaatggccgcttttctggattcatcgactgtggccggctgggtgtggcggaccgctatcaggacatagcgttggctacccgtgatattgctgaagagcttggcggcgaatgggctgaccgcttcctcgtgctttacggtatcgccgctcccgattcgcagcgcatcgccttctatcgccttcttgacgagttcttctgagcgggactctggggttcgaaatgaccgaccaagcgacgcccaacctgccatcacgagatttcgattccaccgccgccttctatgaaaggttgggcttcggaatcgttttccgggacgccggctggatgatcctccagcgcggggatctcatgctggagttcttcgcccaccccaacttgtttattgcagcttataatggttacaaataaagcaatagcatcacaaatttcacaaataaagcatttttttcactgcattctagttgtggtttgtccaaactcatcaatgtatcttatcatgtctgtataccgtcgacctctagctagagcttggcgtaatcatggtcatagctgtttcctgtgtgaaattgttatccgctcacaattccacacaacatacgagccggaagcataaagtgtaaagcctggggtgcctaatgagtgagctaactcacattaattgcgttgcgctcactgcccgctttccagtcgggaaacctgtcgtgccagctgcattaatgaatcggccaacgcgcggggagaggcggtttgcgtattgggcgctcttccgcttcctcgctcactgactcgctgcgctcggtcgttcggctgcggcgagcggtatcagctcactcaaaggcggtaatacggttatccacagaatcaggggataacgcaggaaagaacatgtgagcaaaaggccagcaaaaggccaggaaccgtaaaaaggccgcgttgctggcgtttttccataggctccgcccccctgacgagcatcacaaaaatcgacgctcaagtcagaggtggcgaaacccgacaggactataaagataccaggcgtttccccctggaagctccctcgtgcgctctcctgttccgaccctgccgcttaccggatacctgtccgcctttctcccttcgggaagcgtggcgctttctcatagctcacgctgtaggtatctcagttcggtgtaggtcgttcgctccaagctgggctgtgtgcacgaaccccccgttcagcccgaccgctgcgccttatccggtaactatcgtcttgagtccaacccggtaagacacgacttatcgccactggcagcagccactggtaacaggattagcagagcgaggtatgtaggcggtgctacagagttcttgaagtggtggcctaactacggctacactagaagaacagtatttggtatctgcgctctgctgaagccagttaccttcggaaaaagagttggtagctcttgatccggcaaacaaaccaccgctggtagcggtttttttgtttgcaagcagcagattacgcgcagaaaaaaaggatctcaagaagatcctttgatcttttctacggggtctgacgctcagtggaacgaaaactcacgttaagggattttggtcatgagattatcaaaaaggatcttcacctagatccttttaaattaaaaatgaagttttaaatcaatctaaagtatatatgagtaaacttggtctgacagttaccaatgcttaatcagtgaggcacctatctcagcgatctgtctatttcgttcatccatagttgcctgactccccgtcgtgtagataactacgatacgggagggcttaccatctggccccagtgctgcaatgataccgcgagacccacgctcaccggctccagatttatcagcaataaaccagccagccggaagggccgagcgcagaagtggtcctgcaactttatccgcctccatccagtctattaattgttgccgggaagctagagtaagtagttcgccagttaatagtttgcgcaacgttgttgccattgctacaggcatcgtggtgtcacgctcgtcgtttggtatggcttcattcagctccggttcccaacgatcaaggcgagttacatgatcccccatgttgtgcaaaaaagcggttagctccttcggtcctccgatcgttgtcagaagtaagttggccgcagtgttatcactcatggttatggcagcactgcataattctcttactgtcatgccatccgtaagatgcttttctgtgactggtgagtactcaaccaagtcattctgagaatagtgtatgcggcgaccgagttgctcttgcccggcgtcaatacgggataataccgcgccacatagcagaactttaaaagtgctcatcattggaaaacgttcttcggggcgaaaactctcaaggatcttaccgctgttgagatccagttcgatgtaacccactcgtgcacccaactgatcttcagcatcttttactttcaccagcgtttctgggtgagcaaaaacaggaaggcaaaatgccgcaaaaaagggaataagggcgacacggaaatgttgaatactcatactcttcctttttcaatattattgaagcatttatcagggttattgtctcatgagcggatacatatttgaatgtatttagaaaaataaacaaataggggttccgcgcacatttccccgaaaagtgccacctgacgtc

SEQ ID NO: 263 - DNA, 10803 bp, Artificial Sequence
  Synthetic
gacggatcgggagatctcccgatcccctatggtgcactctcagtacaatctgctctgatgccgcatagttaagccagtatctgctccctgcttgtgtgttggaggtcgctgagtagtgcgcgagcaaaatttaagctacaacaaggcaaggcttgaccgacaattgcatgaagaatctgcttagggttaggcgttttgcgctgcttcgcgatgtacgggccagatatacgcgttgacattgattattgactagttattaatagtaatcaattacggggtcattagttcatagcccatatatggagttccgcgttacataacttacggtaaatggcccgcctggctgaccgcccaacgacccccgcccattgacgtcaataatgacgtatgttcccatagtaacgccaatagggactttccattgacgtcaatgggtggagtatttacggtaaactgcccacttggcagtacatcaagtgtatcatatgccaagtacgccccctattgacgtcaatgacggtaaatggcccgcctggcattatgcccagtacatgaccttatgggactttcctacttggcagtacatctacgtattagtcatcgctattaccatggtgatgcggttttggcagtacatcaatgggcgtggatagcggtttgactcacggggatttccaagtctccaccccattgacgtcaatgggagtttgttttggcaccaaaatcaacgggactttccaaaatgtcgtaacaactccgccccattgacgcaaatgggcggtaggcgtgtacggtgggaggtctatataagcagagctctctggctaactagagaacccactgcttactggcttatcgaaattaatacgactcactatagggagacccaagctggctagcgtttaaacttaagcttgccaccatgggccagagatactactttaccgtgcatttcctgcctaaacaagccaatctggccctgctgacaggcagatgcatcagcatcatgcacggctttatcctgaagcacaacatcgagggaatgggcgttaccttcccagcctggtccgacagcagcatcggcaacgaaattgccttcgtgtacaccgacaaggaaatcctcaacacactgaaggaccaggcctacttcgtggatatgcaggattgcggcttcttcaaggtctcccaagtgctggctgtgcccgattcttgcgaggaagtgcggttcatccggaaccaggccgtggccaaaatcttcaccggagagagcagaagaaggctgaaaagactgcagaagagagccctggccagaggcgaagatttcaaccccaagaagatcgaggcccctcgggaaatcgatatcttccacagagtggccatgaccagcaagagctctcaggaggactacatcctgcacatccagaaacaggacgtggactgtcaggctgagccttactttagcaattacggcctggccagcaacgagaagttcaagggaacagtgcctgacctgagccccagcatcgacagaaacggctccggaaaaagaaccgccgacggcagcgaattcgagtcacccaagaagaagaggaaagtcgggtcctccgagggaaggggctctctgctgacctgcggcgacgtggaggagaaccctggacccggaatgggccacctgaaggagctgctggagatcaccgacaccacagagagggatcgctccctgcggagagccttctctccctacaccgccatgatcgacatcacaggctccgaggccgtggccctgatcatcctgctgaatctgacatatcgcaagaaccaggtggacgatctgctggacaagaagctggccaagcaggccctgaagagcgaggatcacatcaacaagtgcatcaaggagatcgcctggtttcacacccacaatctgaagtacccagatatccgggtgtccaagcagaacctggccgtggagccccctacactgcactcttatgtgctgagctccgccaattaccccaaggcctatggctggagccacaattccgccaaggtgaactttgccaagctgttcgtgagctactttaagtggcagaaccaggtgtcctggctggcccaggtgctggccaccaatagcgacaactggaagtctgccttcacaagcctgggcctgtccgtgaaggccttcaagagcctgtgcgtgaccgtgaagaatagcctgcctgaggaggccatcccagactccgtggataggtattctcgccagatcagaatgccataccacgacggctatctggccgtgacccccgtgatcagccacgtggtgcagtccaagatccagcaggccgccatcgataagcgggccagattctccaacgtggagtttacacgcccagcagccgtgtctatgctggccgccagcctgggaggcgtgatcaatgtgctgaactacccaccctatatcagaagcaagtaccacggcctgtctaatagcagggccttcaagctgaacaatggccagaccgtgtttaacgtggaggccctgctgaagcctgagctgatcaaggccctggagggcatcatcttctccaacaatgccctggccctgaagcagaggcgccagcagaaggtgaagaatatcaaggagctgcgcaacacactgctggagtggttctctccagtgtttgagtggcggctggacgccatcgagaatggctacgatctggagcagctggagtccgcctctgagagactggagtataagatcctgtccctgcccgacaatgagctgccttctctgaccatcccactgttcagactgctgaacgagatgctgggcggcgtgagcatgacacagaggtacgcctttcaccccaagctgatgtcccctctgaaggccgccctgcagtggctgctggtgaatctgaccgaccagaagcacgtgctgatcgaggaggacgatgagcactacagatatctgcacctgtccggcatcagggtgtttgatgcccaggccctgtctaacccatactgctctggcatccccagcctgacagccgtgtggggaatgatccactcttatcagaggaagctgaatgaggccctgggcaccaacgtgcggttcaccagcttcagctggttcatcagaaactacagcgccgtggcaggcaagaagctgcccgagctgagcctgcagggagcacagcagtccagactgaagaggcctggcatcatcgacggcaagtactgtgacctggtgttcgatctgatcatccacatcgatggctatgaggacgatctgcaggccgtggacagcaagcctgatatcctgaaggcccacttcccatccaattttgcaggaggcgtgatgcaccagccagagctgaactctaatatcaactggtgctgtctgtatagcaatgagaaccagctgtttgagaagctgcggagactgcccctgtccggctgctgggtcatgcctaccgagcacaagatccaggacctggatgagctgctgctgctgctgaactctgacagcaagctgtccccttctatgatgggctacatgctgctgaccgagccaatggcccgcgtgggcagcctggagcggctgcactgttacgccgagcctgccatcggcgtggtgaagtatgaggccgccacatctgtgaggctgaagggcatcggcaattatttcaacagcgccttttggatgctggatgcccaggagaagttcatgctgatgaagaaggtgggaagcggcaagcggactgctgatggcagtgaatttgagtccccaaagaagaagagaaaggtgggctcgagcgagggaaggggctccctgctgacttgtggcgacgtggaggagaaccctggccccagcatggagctgtgcaacatcctgaagtacgacaggtctctgtatcccggcaaggccgtgttcttttacaagaccgccgacagcgattttgtgccactggaggccgatatcaacaagatcaggggaccaaagagcggcttcaccgaggcctttacacctcagttctctccaaagaatatcagccctcaggacctgacccacaacaatatcctgacactggaggagtgctatgtgccccctaacgtggagcacatcttctgtaggttttctctgcgcgtgcaggccaatagcctggtgcccagcggctgctccgatcctgaggtgttttccctgctgaaggagctggccgagaccttcaaggagtgcggaggatacaaggagctggccgtgcggtattgtagaaacatcctgatcggcacatggctgtggcggaaccagaataccggcaatacacagatcgagatcaagacctctaagggcagctgttacctgatcgacaacacaagaaagctggcctgggagagcaagtgggcctccgacgatctgaaggtgctggaggagctgtccaacgagatcgagtctgccctgaccgaccctaacgtgttctggagcgccgatatcacagccaagatcgaggcctccttctgccaggaaatctacccatctcagatcctgaacgacaaggtgaagcagggcgaggcctccaagcagtttgtgaaggccaagtgtgccgatggccggtatgccgtgtccttcaattctgtgaagatcggcgccgccctgcagagcatcgacgattggtgggacgaggatgcctccaagaggctgcgcgtgcacgagttcggagcagacaaggagatcggagtggcacggagaccacccgatagcgagcagaacttttactccatcttcaagaataccgagtggtatctgtccgccctgaagaattgtatcacaaacaagaatgagaagatcgatcccgccatctactatctgttttctgtgctgatcaagggcggcatgttccagaagaaggccgaggccaagaaggccgggtctggaaagcgcaccgccgatggttccgagttcgaaagccccaaaaaaaagcgcaaggtcggtagctccgagggaagaggctccctgctgacatgtggcgacgtggaagaaaaccctggacctggcaaacggacagccgacggaagcgagttcgagtcaccgaaaaagaagcgaaaagttggctccggaatggccttcctgttttctcccaaggcccgggcctttagcgacgagtccctggagtcttatctgctgagagtggtgagcgagaatttctttgatagctacgagggcctgtccctggccatcagggaggagctgcacgagctggactttgaggcacacggagcattcccagtggacctgaagcggctgaacgtgtaccacgccaagcacaactctcacttcagaatgagagccctgggactgctggagaccctgctggacctgccccggtatgagctgcagaagctggccctgctgaagagcgatatcaagtttaacagctccgtggccctgtacaacaatggcgtggacatccctctgaggttcatcaggcaccacgcagaggaggcagtggattctatcccagtgtgcagccagtgtctggccgaggaggcctacatcaagcagtcctggcacatcaagtgggtgaatgcctgcaccaagcaccagtgtgccctgctgcacaactgccccgagtgttacgcccctatcaactatatcgagaatgagtccatcacacactgctcttgtggctttgagctgagctgcgcctctaccagccccgtgaatacactgtccatcgagcacctgaacaagctgctggacaagggcgagaggaacgattccaatcctctgtttaacaatatgaccctgacagagaggttcgccgccctgctgtggtatcaggagcggtactctcagaccgacaacttctgcctgaatgatgccgtgaactactttagcaagtggcctgccgtgttcaatacagagctggacgagctgtccaagaacgccgagatgaagctgatcgatctgtttaacaagaccgagttcaagtttatcttcggcgacgccatcctggcctgtccaagcacacagaagcagtccgagtctcacttcatctacagggccctgctggactatctggtgaccctggtggagtccaatccaaagacaaagaagcccaacgccgccgatctgctggtgtctgtgctggaggcagccaccctgctgggcacaagcgtggagcaggtgtaccgcctgtatcagaatggcatcctgcagaccgcctttcggcacaagatgaatcagagaatcaacccttacaagggcgccttctttctgaggcacgtgatcgagtataagacatccttcggcaacgataaggcccgcatgtacctgtctgcctggtgagcggccgctcgagtctagagggcccgtttaaacccgctgatcagcctcgactgtgccttctagttgccagccatctgttgtttgcccctcccccgtgccttccttgaccctggaaggtgccactcccactgtcctttcctaataaaatgaggaaattgcatcgcattgtctgagtaggtgtcattctattctggggggtggggtggggcaggacagcaagggggaggattgggaagacaatagcaggcatgctggggatgcggtgggctctatggcttctgaggcggaaagaaccagctggggctctagggggtatccccacgcgccctgtagcggcgcattaagcgcggcgggtgtggtggttacgcgcagcgtgaccgctacacttgccagcgccctagcgcccgctcctttcgctttcttcccttcctttctcgccacgttcgccggctttccccgtcaagctctaaatcgggggctccctttagggttccgatttagtgctttacggcacctcgaccccaaaaaacttgattagggtgatggttcacgtagtgggccatcgccctgatagacggtttttcgccctttgacgttggagtccacgttctttaatagtggactcttgttccaaactggaacaacactcaaccctatctcggtctattcttttgatttataagggattttgccgatttcggcctattggttaaaaaatgagctgatttaacaaaaatttaacgcgaattaattctgtggaatgtgtgtcagttagggtgtggaaagtccccaggctccccagcaggcagaagtatgcaaagcatgcatctcaattagtcagcaaccaggtgtggaaagtccccaggctccccagcaggcagaagtatgcaaagcatgcatctcaattagtcagcaaccatagtcccgcccctaactccgcccatcccgcccctaactccgcccagttccgcccattctccgccccatggctgactaattttttttatttatgcagaggccgaggccgcctctgcctctgagctattccagaagtagtgaggaggcttttttggaggcctaggcttttgcaaaaagctcccgggagcttgtatatccattttcggatctgatcaagagacaggatgaggatcgtttcgcatgattgaacaagatggattgcacgcaggttctccggccgcttgggtggagaggctattcggctatgactgggcacaacagacaatcggctgctctgatgccgccgtgttccggctgtcagcgcaggggcgcccggttctttttgtcaagaccgacctgtccggtgccctgaatgaactgcaggacgaggcagcgcggctatcgtggctggccacgacgggcgttccttgcgcagctgtgctcgacgttgtcactgaagcgggaagggactggctgctattgggcgaagtgccggggcaggatctcctgtcatctcaccttgctcctgccgagaaagtatccatcatggctgatgcaatgcggcggctgcatacgcttgatccggctacctgcccattcgaccaccaagcgaaacatcgcatcgagcgagcacgtactcggatggaagccggtcttgtcgatcaggatgatctggacgaagagcatcaggggctcgcgccagccgaactgttcgccaggctcaaggcgcgcatgcccgacggcgaggatctcgtcgtgacccatggcgatgcctgcttgccgaatatcatggtggaaaatggccgcttttctggattcatcgactgtggccggctgggtgtggcggaccgctatcaggacatagcgttggctacccgtgatattgctgaagagcttggcggcgaatgggctgaccgcttcctcgtgctttacggtatcgccgctcccgattcgcagcgcatcgccttctatcgccttcttgacgagttcttctgagcgggactctggggttcgaaatgaccgaccaagcgacgcccaacctgccatcacgagatttcgattccaccgccgccttctatgaaaggttgggcttcggaatcgttttccgggacgccggctggatgatcctccagcgcggggatctcatgctggagttcttcgcccaccccaacttgtttattgcagcttataatggttacaaataaagcaatagcatcacaaatttcacaaataaagcatttttttcactgcattctagttgtggtttgtccaaactcatcaatgtatcttatcatgtctgtataccgtcgacctctagctagagcttggcgtaatcatggtcatagctgtttcctgtgtgaaattgttatccgctcacaattccacacaacatacgagccggaagcataaagtgtaaagcctggggtgcctaatgagtgagctaactcacattaattgcgttgcgctcactgcccgctttccagtcgggaaacctgtcgtgccagctgcattaatgaatcggccaacgcgcggggagaggcggtttgcgtattgggcgctcttccgcttcctcgctcactgactcgctgcgctcggtcgttcggctgcggcgagcggtatcagctcactcaaaggcggtaatacggttatccacagaatcaggggataacgcaggaaagaacatgtgagcaaaaggccagcaaaaggccaggaaccgtaaaaaggccgcgttgctggcgtttttccataggctccgcccccctgacgagcatcacaaaaatcgacgctcaagtcagaggtggcgaaacccgacaggactataaagataccaggcgtttccccctggaagctccctcgtgcgctctcctgttccgaccctgccgcttaccggatacctgtccgcctttctcccttcgggaagcgtggcgctttctcatagctcacgctgtaggtatctcagttcggtgtaggtcgttcgctccaagctgggctgtgtgcacgaaccccccgttcagcccgaccgctgcgccttatccggtaactatcgtcttgagtccaacccggtaagacacgacttatcgccactggcagcagccactggtaacaggattagcagagcgaggtatgtaggcggtgctacagagttcttgaagtggtggcctaactacggctacactagaagaacagtatttggtatctgcgctctgctgaagccagttaccttcggaaaaagagttggtagctcttgatccggcaaacaaaccaccgctggtagcggtttttttgtttgcaagcagcagattacgcgcagaaaaaaaggatctcaagaagatcctttgatcttttctacggggtctgacgctcagtggaacgaaaactcacgttaagggattttggtcatgagattatcaaaaaggatcttcacctagatccttttaaattaaaaatgaagttttaaatcaatctaaagtatatatgagtaaacttggtctgacagttaccaatgcttaatcagtgaggcacctatctcagcgatctgtctatttcgttcatccatagttgcctgactccccgtcgtgtagataactacgatacgggagggcttaccatctggccccagtgctgcaatgataccgcgagacccacgctcaccggctccagatttatcagcaataaaccagccagccggaagggccgagcgcagaagtggtcctgcaactttatccgcctccatccagtctattaattgttgccgggaagctagagtaagtagttcgccagttaatagtttgcgcaacgttgttgccattgctacaggcatcgtggtgtcacgctcgtcgtttggtatggcttcattcagctccggttcccaacgatcaaggcgagttacatgatcccccatgttgtgcaaaaaagcggttagctccttcggtcctccgatcgttgtcagaagtaagttggccgcagtgttatcactcatggttatggcagcactgcataattctcttactgtcatgccatccgtaagatgcttttctgtgactggtgagtactcaaccaagtcattctgagaatagtgtatgcggcgaccgagttgctcttgcccggcgtcaatacgggataataccgcgccacatagcagaactttaaaagtgctcatcattggaaaacgttcttcggggcgaaaactctcaaggatcttaccgctgttgagatccagttcgatgtaacccactcgtgcacccaactgatcttcagcatcttttactttcaccagcgtttctgggtgagcaaaaacaggaaggcaaaatgccgcaaaaaagggaataagggcgacacggaaatgttgaatactcatactcttcctttttcaatattattgaagcatttatcagggttattgtctcatgagcggatacatatttgaatgtatttagaaaaataaacaaataggggttccgcgcacatttccccgaaaagtgccacctgacgtc

SEQ ID NO: 264 - DNA, 10800 bp, Artificial Sequence
  Synthetic
gacggatcgggagatctcccgatcccctatggtgcactctcagtacaatctgctctgatgccgcatagttaagccagtatctgctccctgcttgtgtgttggaggtcgctgagtagtgcgcgagcaaaatttaagctacaacaaggcaaggcttgaccgacaattgcatgaagaatctgcttagggttaggcgttttgcgctgcttcgcgatgtacgggccagatatacgcgttgacattgattattgactagttattaatagtaatcaattacggggtcattagttcatagcccatatatggagttccgcgttacataacttacggtaaatggcccgcctggctgaccgcccaacgacccccgcccattgacgtcaataatgacgtatgttcccatagtaacgccaatagggactttccattgacgtcaatgggtggagtatttacggtaaactgcccacttggcagtacatcaagtgtatcatatgccaagtacgccccctattgacgtcaatgacggtaaatggcccgcctggcattatgcccagtacatgaccttatgggactttcctacttggcagtacatctacgtattagtcatcgctattaccatggtgatgcggttttggcagtacatcaatgggcgtggatagcggtttgactcacggggatttccaagtctccaccccattgacgtcaatgggagtttgttttggcaccaaaatcaacgggactttccaaaatgtcgtaacaactccgccccattgacgcaaatgggcggtaggcgtgtacggtgggaggtctatataagcagagctctctggctaactagagaacccactgcttactggcttatcgaaattaatacgactcactatagggagacccaagctggctagcgtttaaacttaagcttgccaccatgggccagagatactactttaccgtgcatttcctgcctaaacaagccaatctggccctgctgacaggcagatgcatcagcatcatgcacggctttatcctgaagcacaacatcgagggaatgggcgttaccttcccagcctggtccgacagcagcatcggcaacgaaattgccttcgtgtacaccgacaaggaaatcctcaacacactgaaggaccaggcctacttcgtggatatgcaggattgcggcttcttcaaggtctcccaagtgctggctgtgcccgattcttgcgaggaagtgcggttcatccggaaccaggccgtggccaaaatcttcaccggagagagcagaagaaggctgaaaagactgcagaagagagccctggccagaggcgaagatttcaaccccaagaagatcgaggcccctcgggaaatcgatatcttccacagagtggccatgaccagcaagagctctcaggaggactacatcctgcacatccagaaacaggacgtggactgtcaggctgagccttactttagcaattacggcctggccagcaacgagaagttcaagggaacagtgcctgacctgagccccagcatcgacagaaacggctccggaaaaagaaccgccgacggcagcgaattcgagtcacccaagaagaagaggaaagtcgggtcctccgagggaaggggctctctgctgacctgcggcgacgtggaggagaaccctggacccggaatggagctgtgcaacatcctgaagtacgacaggtctctgtatcccggcaaggccgtgttcttttacaagaccgccgacagcgattttgtgccactggaggccgatatcaacaagatcaggggaccaaagagcggcttcaccgaggcctttacacctcagttctctccaaagaatatcagccctcaggacctgacccacaacaatatcctgacactggaggagtgctatgtgccccctaacgtggagcacatcttctgtaggttttctctgcgcgtgcaggccaatagcctggtgcccagcggctgctccgatcctgaggtgttttccctgctgaaggagctggccgagaccttcaaggagtgcggaggatacaaggagctggccgtgcggtattgtagaaacatcctgatcggcacatggctgtggcggaaccagaataccggcaatacacagatcgagatcaagacctctaagggcagctgttacctgatcgacaacacaagaaagctggcctgggagagcaagtgggcctccgacgatctgaaggtgctggaggagctgtccaacgagatcgagtctgccctgaccgaccctaacgtgttctggagcgccgatatcacagccaagatcgaggcctccttctgccaggaaatctacccatctcagatcctgaacgacaaggtgaagcagggcgaggcctccaagcagtttgtgaaggccaagtgtgccgatggccggtatgccgtgtccttcaattctgtgaagatcggcgccgccctgcagagcatcgacgattggtgggacgaggatgcctccaagaggctgcgcgtgcacgagttcggagcagacaaggagatcggagtggcacggagaccacccgatagcgagcagaacttttactccatcttcaagaataccgagtggtatctgtccgccctgaagaattgtatcacaaacaagaatgagaagatcgatcccgccatctactatctgttttctgtgctgatcaagggcggcatgttccagaagaaggccgaggccaagaaggccggaagcggcaagcggactgctgatggcagtgaatttgagtccccaaagaagaagagaaaggtgggctcgagcgagggaaggggctccctgctgacttgtggcgacgtggaggagaaccctggccccagcatgcacctgaaggagctgctggagatcaccgacaccacagagagggatcgctccctgcggagagccttctctccctacaccgccatgatcgacatcacaggctccgaggccgtggccctgatcatcctgctgaatctgacatatcgcaagaaccaggtggacgatctgctggacaagaagctggccaagcaggccctgaagagcgaggatcacatcaacaagtgcatcaaggagatcgcctggtttcacacccacaatctgaagtacccagatatccgggtgtccaagcagaacctggccgtggagccccctacactgcactcttatgtgctgagctccgccaattaccccaaggcctatggctggagccacaattccgccaaggtgaactttgccaagctgttcgtgagctactttaagtggcagaaccaggtgtcctggctggcccaggtgctggccaccaatagcgacaactggaagtctgccttcacaagcctgggcctgtccgtgaaggccttcaagagcctgtgcgtgaccgtgaagaatagcctgcctgaggaggccatcccagactccgtggataggtattctcgccagatcagaatgccataccacgacggctatctggccgtgacccccgtgatcagccacgtggtgcagtccaagatccagcaggccgccatcgataagcgggccagattctccaacgtggagtttacacgcccagcagccgtgtctatgctggccgccagcctgggaggcgtgatcaatgtgctgaactacccaccctatatcagaagcaagtaccacggcctgtctaatagcagggccttcaagctgaacaatggccagaccgtgtttaacgtggaggccctgctgaagcctgagctgatcaaggccctggagggcatcatcttctccaacaatgccctggccctgaagcagaggcgccagcagaaggtgaagaatatcaaggagctgcgcaacacactgctggagtggttctctccagtgtttgagtggcggctggacgccatcgagaatggctacgatctggagcagctggagtccgcctctgagagactggagtataagatcctgtccctgcccgacaatgagctgccttctctgaccatcccactgttcagactgctgaacgagatgctgggcggcgtgagcatgacacagaggtacgcctttcaccccaagctgatgtcccctctgaaggccgccctgcagtggctgctggtgaatctgaccgaccagaagcacgtgctgatcgaggaggacgatgagcactacagatatctgcacctgtccggcatcagggtgtttgatgcccaggccctgtctaacccatactgctctggcatccccagcctgacagccgtgtggggaatgatccactcttatcagaggaagctgaatgaggccctgggcaccaacgtgcggttcaccagcttcagctggttcatcagaaactacagcgccgtggcaggcaagaagctgcccgagctgagcctgcagggagcacagcagtccagactgaagaggcctggcatcatcgacggcaagtactgtgacctggtgttcgatctgatcatccacatcgatggctatgaggacgatctgcaggccgtggacagcaagcctgatatcctgaaggcccacttcccatccaattttgcaggaggcgtgatgcaccagccagagctgaactctaatatcaactggtgctgtctgtatagcaatgagaaccagctgtttgagaagctgcggagactgcccctgtccggctgctgggtcatgcctaccgagcacaagatccaggacctggatgagctgctgctgctgctgaactctgacagcaagctgtccccttctatgatgggctacatgctgctgaccgagccaatggcccgcgtgggcagcctggagcggctgcactgttacgccgagcctgccatcggcgtggtgaagtatgaggccgccacatctgtgaggctgaagggcatcggcaattatttcaacagcgccttttggatgctggatgcccaggagaagttcatgctgatgaagaaggtggggtctggaaagcgcaccgccgatggttccgagttcgaaagccccaaaaaaaagcgcaaggtcggtagctccgagggaagaggctccctgctgacatgtggcgacgtggaagaaaaccctggacctggcaaacggacagccgacggaagcgagttcgagtcaccgaaaaagaagcgaaaagttggctccggaatggccttcctgttttctcccaaggcccgggcctttagcgacgagtccctggagtcttatctgctgagagtggtgagcgagaatttctttgatagctacgagggcctgtccctggccatcagggaggagctgcacgagctggactttgaggcacacggagcattcccagtggacctgaagcggctgaacgtgtaccacgccaagcacaactctcacttcagaatgagagccctgggactgctggagaccctgctggacctgccccggtatgagctgcagaagctggccctgctgaagagcgatatcaagtttaacagctccgtggccctgtacaacaatggcgtggacatccctctgaggttcatcaggcaccacgcagaggaggcagtggattctatcccagtgtgcagccagtgtctggccgaggaggcctacatcaagcagtcctggcacatcaagtgggtgaatgcctgcaccaagcaccagtgtgccctgctgcacaactgccccgagtgttacgcccctatcaactatatcgagaatgagtccatcacacactgctcttgtggctttgagctgagctgcgcctctaccagccccgtgaatacactgtccatcgagcacctgaacaagctgctggacaagggcgagaggaacgattccaatcctctgtttaacaatatgaccctgacagagaggttcgccgccctgctgtggtatcaggagcggtactctcagaccgacaacttctgcctgaatgatgccgtgaactactttagcaagtggcctgccgtgttcaatacagagctggacgagctgtccaagaacgccgagatgaagctgatcgatctgtttaacaagaccgagttcaagtttatcttcggcgacgccatcctggcctgtccaagcacacagaagcagtccgagtctcacttcatctacagggccctgctggactatctggtgaccctggtggagtccaatccaaagacaaagaagcccaacgccgccgatctgctggtgtctgtgctggaggcagccaccctgctgggcacaagcgtggagcaggtgtaccgcctgtatcagaatggcatcctgcagaccgcctttcggcacaagatgaatcagagaatcaacccttacaagggcgccttctttctgaggcacgtgatcgagtataagacatccttcggcaacgataaggcccgcatgtacctgtctgcctggtgagcggccgctcgagtctagagggcccgtttaaacccgctgatcagcctcgactgtgccttctagttgccagccatctgttgtttgcccctcccccgtgccttccttgaccctggaaggtgccactcccactgtcctttcctaataaaatgaggaaattgcatcgcattgtctgagtaggtgtcattctattctggggggtggggtggggcaggacagcaagggggaggattgggaagacaatagcaggcatgctggggatgcggtgggctctatggcttctgaggcggaaagaaccagctggggctctagggggtatccccacgcgccctgtagcggcgcattaagcgcggcgggtgtggtggttacgcgcagcgtgaccgctacacttgccagcgccctagcgcccgctcctttcgctttcttcccttcctttctcgccacgttcgccggctttccccgtcaagctctaaatcgggggctccctttagggttccgatttagtgctttacggcacctcgaccccaaaaaacttgattagggtgatggttcacgtagtgggccatcgccctgatagacggtttttcgccctttgacgttggagtccacgttctttaatagtggactcttgttccaaactggaacaacactcaaccctatctcggtctattcttttgatttataagggattttgccgatttcggcctattggttaaaaaatgagctgatttaacaaaaatttaacgcgaattaattctgtggaatgtgtgtcagttagggtgtggaaagtccccaggctccccagcaggcagaagtatgcaaagcatgcatctcaattagtcagcaaccaggtgtggaaagtccccaggctccccagcaggcagaagtatgcaaagcatgcatctcaattagtcagcaaccatagtcccgcccctaactccgcccatcccgcccctaactccgcccagttccgcccattctccgccccatggctgactaattttttttatttatgcagaggccgaggccgcctctgcctctgagctattccagaagtagtgaggaggcttttttggaggcctaggcttttgcaaaaagctcccgggagcttgtatatccattttcggatctgatcaagagacaggatgaggatcgtttcgcatgattgaacaagatggattgcacgcaggttctccggccgcttgggtggagaggctattcggctatgactgggcacaacagacaatcggctgctctgatgccgccgtgttccggctgtcagcgcaggggcgcccggttctttttgtcaagaccgacctgtccggtgccctgaatgaactgcaggacgaggcagcgcggctatcgtggctggccacgacgggcgttccttgcgcagctgtgctcgacgttgtcactgaagcgggaagggactggctgctattgggcgaagtgccggggcaggatctcctgtcatctcaccttgctcctgccgagaaagtatccatcatggctgatgcaatgcggcggctgcatacgcttgatccggctacctgcccattcgaccaccaagcgaaacatcgcatcgagcgagcacgtactcggatggaagccggtcttgtcgatcaggatgatctggacgaagagcatcaggggctcgcgccagccgaactgttcgccaggctcaaggcgcgcatgcccgacggcgaggatctcgtcgtgacccatggcgatgcctgcttgccgaatatcatggtggaaaatggccgcttttctggattcatcgactgtggccggctgggtgtggcggaccgctatcaggacatagcgttggctacccgtgatattgctgaagagcttggcggcgaatgggctgaccgcttcctcgtgctttacggtatcgccgctcccgattcgcagcgcatcgccttctatcgccttcttgacgagttcttctgagcgggactctggggttcgaaatgaccgaccaagcgacgcccaacctgccatcacgagatttcgattccaccgccgccttctatgaaaggttgggcttcggaatcgttttccgggacgccggctggatgatcctccagcgcggggatctcatgctggagttcttcgcccaccccaacttgtttattgcagcttataatggttacaaataaagcaatagcatcacaaatttcacaaataaagcatttttttcactgcattctagttgtggtttgtccaaactcatcaatgtatcttatcatgtctgtataccgtcgacctctagctagagcttggcgtaatcatggtcatagctgtttcctgtgtgaaattgttatccgctcacaattccacacaacatacgagccggaagcataaagtgtaaagcctggggtgcctaatgagtgagctaactcacattaattgcgttgcgctcactgcccgctttccagtcgggaaacctgtcgtgccagctgcattaatgaatcggccaacgcgcggggagaggcggtttgcgtattgggcgctcttccgcttcctcgctcactgactcgctgcgctcggtcgttcggctgcggcgagcggtatcagctcactcaaaggcggtaatacggttatccacagaatcaggggataacgcaggaaagaacatgtgagcaaaaggccagcaaaaggccaggaaccgtaaaaaggccgcgttgctggcgtttttccataggctccgcccccctgacgagcatcacaaaaatcgacgctcaagtcagaggtggcgaaacccgacaggactataaagataccaggcgtttccccctggaagctccctcgtgcgctctcctgttccgaccctgccgcttaccggatacctgtccgcctttctcccttcgggaagcgtggcgctttctcatagctcacgctgtaggtatctcagttcggtgtaggtcgttcgctccaagctgggctgtgtgcacgaaccccccgttcagcccgaccgctgcgccttatccggtaactatcgtcttgagtccaacccggtaagacacgacttatcgccactggcagcagccactggtaacaggattagcagagcgaggtatgtaggcggtgctacagagttcttgaagtggtggcctaactacggctacactagaagaacagtatttggtatctgcgctctgctgaagccagttaccttcggaaaaagagttggtagctcttgatccggcaaacaaaccaccgctggtagcggtttttttgtttgcaagcagcagattacgcgcagaaaaaaaggatctcaagaagatcctttgatcttttctacggggtctgacgctcagtggaacgaaaactcacgttaagggattttggtcatgagattatcaaaaaggatcttcacctagatccttttaaattaaaaatgaagttttaaatcaatctaaagtatatatgagtaaacttggtctgacagttaccaatgcttaatcagtgaggcacctatctcagcgatctgtctatttcgttcatccatagttgcctgactccccgtcgtgtagataactacgatacgggagggcttaccatctggccccagtgctgcaatgataccgcgagacccacgctcaccggctccagatttatcagcaataaaccagccagccggaagggccgagcgcagaagtggtcctgcaactttatccgcctccatccagtctattaattgttgccgggaagctagagtaagtagttcgccagttaatagtttgcgcaacgttgttgccattgctacaggcatcgtggtgtcacgctcgtcgtttggtatggcttcattcagctccggttcccaacgatcaaggcgagttacatgatcccccatgttgtgcaaaaaagcggttagctccttcggtcctccgatcgttgtcagaagtaagttggccgcagtgttatcactcatggttatggcagcactgcataattctcttactgtcatgccatccgtaagatgcttttctgtgactggtgagtactcaaccaagtcattctgagaatagtgtatgcggcgaccgagttgctcttgcccggcgtcaatacgggataataccgcgccacatagcagaactttaaaagtgctcatcattggaaaacgttcttcggggcgaaaactctcaaggatcttaccgctgttgagatccagttcgatgtaacccactcgtgcacccaactgatcttcagcatcttttactttcaccagcgtttctgggtgagcaaaaacaggaaggcaaaatgccgcaaaaaagggaataagggcgacacggaaatgttgaatactcatactcttcctttttcaatattattgaagcatttatcagggttattgtctcatgagcggatacatatttgaatgtatttagaaaaataaacaaataggggttccgcgcacatttccccgaaaagtgccacctgacgtc

SEQ ID NO: 265 - DNA, 3077 bp, Artificial Sequence
  Synthetic
ttgagatcctttttttctgcgcgtaatctgctgcttgcaaacaaaaaaaccaccgctaccagcggtggtttgtttgccggatcaagagctaccaactctttttccgaaggtaactggcttcagcagagcgcagataccaaatactgttcttctagtgtagccgtagttaggccaccacttcaagaactctgtagcaccgcctacatacctcgctctgctaatcctgttaccagtggctgctgccagtggcgataagtcgtgtcttaccgggttggactcaagacgatagttaccggataaggcgcagcggtcgggctgaacggggggttcgtgcacacagcccagcttggagcgaacgacctacaccgaactgagatacctacagcgtgagctatgagaaagcgccacgcttcccgaagggagaaaggcggacaggtatccggtaagcggcagggtcggaacaggagagcgcacgagggagcttccagggggaaacgcctggtatctttatagtcctgtcgggtttcgccacctctgacttgagcgtcgatttttgtgatgctcgtcaggggggcggagcctatggaaaaacgccagcaacgcggcctttttacggttcctggccttttgctggccttttgctcacatgttctttcctgcgttatcccctgattctgtggataaccgtattaccgcctttgagtgagctgataccgctcgccgcagccgaacgaccgagcgcagcgagtcagtgagcgaggaagcggaagagcgtgttgatcggctttaaggatctagtgtcgctgcaaccatagtttgacataatgcaaccataccttgacataattaaagtcatactctgacataaagccccctggagaattcgccaccatgatcagcatgctcgagatcggcacgtaagaggttccaactttcaccataatgcaagggcgaggaggataaaataagatcactaccgggcgtattttttgagttatcgagattttcaggagctaaggaagctaaaatggagaaaaaaatcactggatataccaccgttgatatatcccaatggcatcgtaaagaacattttgaggcatttcagtcagttgctcaatgtacctataaccagaccgttcagctggatattacggcctttttaaagaccgtaaagaaaaataagcacaagttttatccggcctttattcacattcttgcccgcctgatgaatgctcatccggagttccgtatggcaatgaaagacggtgagctggtgatatgggatagtgttcacccttgttacaccgttttccatgagcaaactgaaacgttttcatcgctctggagtgaataccacgacgatttccggcagtttctacacatatattcgcaagatgtggcgtgttacggtgaaaacctggcctatttccctaaagggtttattgagaatatgtttttcgtctcagccaatccctgggtgagtttcaccagttttgatttaaacgtggccaatatggacaacttcttcgcccccgttttcactatgggcaaatattatacgcaaggcgacaaggtgctgatgccgctggcgattcaggttcatcatgccgtctgtgatggcttccatgtcggcagaatgcttaatgaattacaacagtactgcgatgagtggcagggcggggcgtaatttttttaaggcagttattggtgcccttctagagtatcctcctcgcccttgtcggctggtttttttgtttttagcgttataacttttatttcactatgtcactgtatggttgcattttatgtcagtgaatggttgcaggttttttgtaagttattgatatgcctatccagtgtatgtcacgctttgcttgcagcgacatctaggatcttagcgcgcttttatggacgtcaggtggcacttttcggggaaatgtgcgcggaacccctatttgtttatttttctaaatacattcaaatatgtatccgctcatgagacaataaccctgataaatgcttcaataatattgaaaaaggaagagtatgagtattcaacatttccgtgtcgcccttattcccttttttgcggcattttgccttcctgtttttgctcacccagaaacgctggtgaaagtaaaagatgctgaagatcagttgggtgcacgagtgggttacatcgaactggatctcaacagcggtaagatccttgagagttttcgccccgaagaacgttttccaatgatgagcacttttaaagttctgctatgtggcgcggtattatcccgtattgacgccgggcaagagcaactcggtcgccgcatacactattctcagaatgacttggttgagtactcaccagtcacagaaaagcatcttacggatggcatgacagtaagagaattatgcagtgctgccataaccatgagtgataacactgcggccaacttacttctgacaacgatcggaggaccgaaggagctaaccgcttttttgcacaacatgggggatcatgtaactcgccttgatcgttgggaaccggagctgaatgaagccataccaaacgacgagcgtgacaccacgatgcctgtagcaatggcaacaacgttgcgcaaactattaactggcgaactacttactctagcttcccggcaacaattaatagactggatggaggcggataaagttgcaggaccacttctgcgctcggcccttccggctggctggtttattgctgataaatctggagccggtgagcgtgggtctcgcggtatcattgcagcactggggccagatggtaagccctcccgtatcgtagttatctacacgacggggagtcaggcaactatggatgaacgaaatagacagatcgctgagataggtgcctcactgattaagcattggtaactgtcagaccaagtttactcatatatactttagattgatttaaaacttcatttttaatttaaaaggatctaggtgaagatcctttttgataatctcatgaccaaaatcccttaacgtgagttttcgttccactgagcgtcagaccccgtagaaaagatcaaaggatcttc

SEQ ID NO: 266 - DNA, 4845 bp, Artificial Sequence
  Synthetic
agttgcgcagcctgaatggcgaatggcgcctgatgcggtattttctccttacgcatctgtgcggtatttcacaccgcatatggtgcactctcagtacaatctgctctgatgccgcatagttaagccagccccgacacccgccaacacccgctgacgcgccctgacgggcttgtctgctcccggcatccgcttacagacaagctgtgaccgtctccgggagctgcatgtgtcagaggttttcaccgtcatcaccgaaacgcgcgagacgaaagggcctcgtgatacgcctatttttataggttaatgtcatgataataatggtttcttagacgtcaggtggcacttttcggggaaatgtgcgcggaacccctatttgtttatttttctaaatacattcaaatatgtatccgctcatgagacaataaccctgataaatgcttcaataatattgaaaaaggaagagtatgagtattcaacatttccgtgtcgcccttattcccttttttgcggcattttgccttcctgtttttgctcacccagaaacgctggtgaaagtaaaagatgctgaagatcagttgggtgcacgagtgggttacatcgaactggatctcaacagcggtaagatccttgagagttttcgccccgaagaacgttttccaatgatgagcacttttaaagttctgctatgtggcgcggtattatcccgtattgacgccgggcaagagcaactcggtcgccgcatacactattctcagaatgacttggttgagtactcaccagtcacagaaaagcatcttacggatggcatgacagtaagagaattatgcagtgctgccataaccatgagtgataacactgcggccaacttacttctgacaacgatcggaggaccgaaggagctaaccgcttttttgcacaacatgggggatcatgtaactcgccttgatcgttgggaaccggagctgaatgaagccataccaaacgacgagcgtgacaccacgatgcctgtagcaatggcaacaacgttgcgcaaactattaactggcgaactacttactctagcttcccggcaacaattaatagactggatggaggcggataaagttgcaggaccacttctgcgctcggcccttccggctggctggtttattgctgataaatctggagccggtgagcgtgggtctcgcggtatcattgcagcactggggccagatggtaagccctcccgtatcgtagttatctacacgacggggagtcaggcaactatggatgaacgaaatagacagatcgctgagataggtgcctcactgattaagcattggtaactgtcagaccaagtttactcatatatactttagattgatttaaaacttcatttttaatttaaaaggatctaggtgaagatcctttttgataatctcatgaccaaaatcccttaacgtgagttttcgttccactgagcgtcagaccccgtagaaaagatcaaaggatcttcttgagatcctttttttctgcgcgtaatctgctgcttgcaaacaaaaaaaccaccgctaccagcggtggtttgtttgccggatcaagagctaccaactctttttccgaaggtaactggcttcagcagagcgcagataccaaatactgttcttctagtgtagccgtagttaggccaccacttcaagaactctgtagcaccgcctacatacctcgctctgctaatcctgttaccagtggctgctgccagtggcgataagtcgtgtcttaccgggttggactcaagacgatagttaccggataaggcgcagcggtcgggctgaacggggggttcgtgcacacagcccagcttggagcgaacgacctacaccgaactgagatacctacagcgtgagctatgagaaagcgccacgcttcccgaagggagaaaggcggacaggtatccggtaagcggcagggtcggaacaggagagcgcacgagggagcttccagggggaaacgcctggtatctttatagtcctgtcgggtttcgccacctctgacttgagcgtcgatttttgtgatgctcgtcaggggggcggagcctatggaaaaacgccagcaacgcggcctttttacggttcctggccttttgctggccttttgctcacatgttctttcctgcgttatcccctgattctgtggataaccgtattaccgcctttgagtgagctgataccgctcgccgcagccgaacgaccgagcgcagcgagtcagtgagcgaggaagcggaagagcgcccaatacgcaaaccgcctctccccgcgcgttggccgattcattaatgcagctggcacgacaggtttcccgactggaaagcgggcagtgagcgcaacgcaattaatgtgagttagctcactcattaggcaccccaggctttacactttatgcttccggctcgtatgttgtgtggaattgtgagcggataacaatttcacacaggaaacagctatgaccatgattacgccaacgtttaataaataataaataataaaataaaaaataaaaaataaataagatacattgatgagtttggacaaaccacaactagaatgcagtgaaaaaaatgctttatttgtgaaatttgtgatgctattgctttatttgtaaccattataagctgcaataaacaagttaagctttgtcgctgcaaccatagtttgacataatgcaaccataccttgacataattaaagtcatactctgacataaagcccgatcagcattagcaagacggctcacgagatggagccagagaggatcctggatcgtgtcttcgactgacctcttctcttcctcccacagggcctcgagagatctggcagcggagagggcagaggaagtctgctaacatgcggtgacgtcgaggagaatcctggccctaggctcgagatgaccgagtacaagcccacggtgcgcctcgccacccgcgacgacgtccccagggccgtacgcaccctcgccgccgcgttcgccgactaccccgccacgcgccacaccgtcgatccggaccgccacatcgagcgggtcaccgagctgcaagaactcttcctcacgcgcgtcgggctcgacatcggcaaggtgtgggtcgcggacgacggcgccgcggtggcggtctggaccacgccggagagcgtcgaagcgggggcggtgttcgccgagatcggcccgcgcatggccgagttgagcggttcccggctggccgcgcagcaacagatggaaggcctcctggcgccgcaccggcccaaggagcccgcgtggttcctggccaccgtcggagtctcgcccgaccaccagggcaagggtctgggcagcgccgtcgtgctccccggagtggaggcggccgagcgcgccggggtgcccgccttcctggagacctccgcgccccgcaacctccccttctacgagcggctcggcttcaccgtcaccgccgacgtcgaggtgcccgaaggaccgcgcacctggtgcatgacccgcaagcccggtgccggcagtggagagggcagaggaagtctgctaacatgcggtgacgtcgaggagaatcctggcccagtgagcaagggcgaggagctgttcaccggggtggtgcccatcctggtcgagctggacggcgacgtaaacggccacaagttcagcgtgtccggcgagggcgagggcgatgccacctacggcaagctgaccctgaagttcatctgcaccaccggcaagctgcccgtgccctggcccaccctcgtgaccaccctgacctacggcgtgcagtgcttcagccgctaccccgaccacatgaagcagcacgacttcttcaagtccgccatgcccgaaggctacgtccaggagcgcaccatcttcttcaaggacgacggcaactacaagacccgcgccgaggtgaagttcgagggcgacaccctggtgaaccgcatcgagctgaagggcatcgacttcaaggaggacggcaacatcctggggcacaagctggagtacaactacaacagccacaacgtctatatcatggccgacaagcagaagaacggcatcaaggtgaacttcaagatccgccacaacatcgaggacggcagcgtgcagctcgccgaccactaccagcagaacacccccatcggcgacggccccgtgctgctgcccgacaaccactacctgagcacccagtccgccctgagcaaagaccccaacgagaagcgcgatcacatggtcctgctggagttcgtgaccgccgccgggatcactctcggcatggacgagctgtacaaggaattctaactagagctcgctgatcagcctcgactgtgccttctagttgccagccatctgttgtttgcccctcccccgtgccttccttgaccctggaaggtgccactcccactgtcctttcctaataaaatgaggaaattgcatcgcattgtctgagtaggtgtcattctattctggggggtggggtggggcaggacagcaagggggaggattgggaagagaatagcaggcatgctggggatcgaagacacagtcggctggtttttttgtttttagcgttataacttttatttcactatgtcactgtatggttgcattttatgtcagtgaatggttgcaggttttttgtaagttattgatatgcctatccagtgtatgtcacgctttgcttgcagcgacaggtaccgagctcgaattcactggccgtcgttttacaacgtcgtgactgggaaaaccctggcgttacccaacttaatcgccttgcagcacatccccctttcgccagctggcgtaatagcgaagaggcccgcaccgatcgcccttcccaac

SEQ ID NO: 267 - DNA, 4798 bp, Artificial Sequence
  Synthetic
ttgcccggcgtcaatacgggataataccgcgccacatagcagaactttaaaagtgctcatcattggaaaacgttcttcggggcgaaaactctcaaggatcttaccgctgttgagatccagttcgatgtaacccactcgtgcacccaactgatcttcagcatcttttactttcaccagcgtttctgggtgagcaaaaacaggaaggcaaaatgccgcaaaaaagggaataagggcgacacggaaatgttgaatactcatactcttcctttttcattattattgaagcatttatcagggttattgtctcatgagcggatacatatttgaatgtatttagaaaaataaacaaataggggttccgcgcacatttccccgaaaagtgccacctgacgtcgacggatcgggagatctcccgatcccctatggtcgactctcagtacaatctgctctgatgccgcatagttaagccagtatctgctccctgcttgtgtgttggaggtcgctgagtagtgcgcgagcaaaatttaagctacaacaaggcaaggcttgaccgacaattgcatgaagaatctgcttagggttaggcgttttgcgctgcttcgcgatgtacgggccagatatacgcgagggcctatttcccatgattccttcatatttgcatatacgatacaaggctgttagagagataattagaattaatttgactgtaaacacaaagatattagtacaaaatacgtgacgtagaaagtaataatttcttgggtagtttgcagttttaaaattatgttttaaaatggactatcatatgcttaccgtaacttgaaagtatttcgatttcttggctttatatatcttgtggaaaggacgaaacaccgtaatacgactcactatagggtctagaattcctgtgacctgccgtataggcagctgaagatcggagctgcgccctttctcactggttctctcttaattctgccgaaaaggcagtgagtagtgtagcggccgctttttttcttctgaggcggaaagaaccagctggggctctagggggtatccccacgcgccctgtagcggcgcattaagcgcggcgggtgtggtggttacgcgcagcgtgaccgctacacttgccagcgccctagcgcccgctcctttcgctttcttcccttcctttctcgccacgttcgccggctttccccgtcaagctctaaatcgggggctccctttagggttccgatttagtgctttacggcacctcgaccccaaaaaacttgattagggtgatggttcacgtagtgggccatcgccctgatagacggtttttcgccctttgacgttggagtccacgttctttaatagtggactcttgttccaaactggaacaacactcaaccctatctcggtctattcttttgatttataagggattttgccgatttcggcctattggttaaaaaatgagctgatttaacaaaaatttaacgcgaattaattctgtggaatgtgtgtcagttagggtgtggaaagtccccaggctccccagcaggcagaagtatgcaaagcatgcatctcaattagtcagcaaccaggtgtggaaagtccccaggctccccagcaggcagaagtatgcaaagcatgcatctcaattagtcagcaaccatagtcccgcccctaactccgcccatcccgcccctaactccgcccagttccgcccattctccgccccatggctgactaattttttttatttatgcagaggccgaggccgcctctgcctctgagctattccagaagtagtgaggaggcttttttggaggcctaggcttttgcaaaaagctcccgggagcttgtatatccattttcggatctgatcaagagacaggatgaggatcgtttcgcatgattgaacaagatggattgcacgcaggttctccggccgcttgggtggagaggctattcggctatgactgggcacaacagacaatcggctgctctgatgccgccgtgttccggctgtcagcgcaggggcgcccggttctttttgtcaagaccgacctgtccggtgccctgaatgaactgcaggacgaggcagcgcggctatcgtggctggccacgacgggcgttccttgcgcagctgtgctcgacgttgtcactgaagcgggaagggactggctgctattgggcgaagtgccggggcaggatctcctgtcatctcaccttgctcctgccgagaaagtatccatcatggctgatgcaatgcggcggctgcatacgcttgatccggctacctgcccattcgaccaccaagcgaaacatcgcatcgagcgagcacgtactcggatggaagccggtcttgtcgatcaggatgatctggacgaagagcatcaggggctcgcgccagccgaactgttcgccaggctcaaggcgcgcatgcccgacggcgaggatctcgtcgtgacccatggcgatgcctgcttgccgaatatcatggtggaaaatggccgcttttctggattcatcgactgtggccggctgggtgtggcggaccgctatcaggacatagcgttggctacccgtgatattgctgaagagcttggcggcgaatgggctgaccgcttcctcgtgctttacggtatcgccgctcccgattcgcagcgcatcgccttctatcgccttcttgacgagttcttctgagcgggactctggggttcgaaatgaccgaccaagcgacgcccaacctgccatcacgagatttcgattccaccgccgccttctatgaaaggttgggcttcggaatcgttttccgggacgccggctggatgatcctccagcgcggggatctcatgctggagttcttcgcccaccccaacttgtttattgcagcttataatggttacaaataaagcaatagcatcacaaatttcacaaataaagcatttttttcactgcattctagttgtggtttgtccaaactcatcaatgtatcttatcatgtctgtataccgtcgacctctagctagagcttggcgtaatcatggtcatagctgtttcctgtgtgaaattgttatccgctcacaattccacacaacatacgagccggaagcataaagtgtaaagcctggggtgcctaatgagtgagctaactcacattaattgcgttgcgctcactgcccgctttccagtcgggaaacctgtcgtgccagctgcattaatgaatcggccaacgcgcggggagaggcggtttgcgtattgggcgctcttccgcttcctcgctcactgactcgctgcgctcggtcgttcggctgcggcgagcggtatcagctcactcaaaggcggtaatacggttatccacagaatcaggggataacgcaggaaagaacatgtgagcaaaaggccagcaaaaggccaggaaccgtaaaaaggccgcgttgctggcgtttttccataggctccgcccccctgacgagcatcacaaaaatcgacgctcaagtcagaggtggcgaaacccgacaggactataaagataccaggcgtttccccctggaagctccctcgtgcgctctcctgttccgaccctgccgcttaccggatacctgtccgcctttctcccttcgggaagcgtggcgctttctcaatgctcacgctgtaggtatctcagttcggtgtaggtcgttcgctccaagctgggctgtgtgcacgaaccccccgttcagcccgaccgctgcgccttatccggtaactatcgtcttgagtccaacccggtaagacacgacttatcgccactggcagcagccactggtaacaggattagcagagcgaggtatgtaggcggtgctacagagttcttgaagtggtggcctaactacggctacactagaaggacagtatttggtatctgcgctctgctgaagccagttaccttcggaaaaagagttggtagctcttgatccggcaaacaaaccaccgctggtagcggtggtttttttgtttgcaagcagcagattacgcgcagaaaaaaaggatctcaagaagatcctttgatcttttctacggggtctgacgctcagtggaacgaaaactcacgttaagggattttggtcatgagattatcaaaaaggatcttcacctagatccttttaaattaaaaatgaagttttaaatcaatctaaagtatatatgagtaaacttggtctgacagttaccaatgcttaatcagtgaggcacctatctcagcgatctgtctatttcgttcatccatagttgcctgactccccgtcgtgtagataactacgatacgggagggcttaccatctggccccagtgctgcaatgataccgcgagacccacgctcaccggctccagatttatcagcaataaaccagccagccggaagggccgagcgcagaagtggtcctgcaactttatccgcctccatccagtctattaattgttgccgggaagctagagtaagtagttcgccagttaatagtttgcgcaacgttgttgccattgctacaggcatcgtggtgtcacgctcgtcgtttggtatggcttcattcagctccggttcccaacgatcaaggcgagttacatgatcccccatgttgtgcaaaaaagcggttagctccttcggtcctccgatcgttgtcagaagtaagttggccgcagtgttatcactcatggttatggcagcactgcataattctcttactgtcatgccatccgtaagatgcttttctgtgactggtgagtactcaaccaagtcattctgagaatagtgtatgcggcgaccgagttgctc

SEQ ID NO: 268 - DNA, 4874 bp, Artificial Sequence
  Synthetic
cagatggtaagccctcccgtatcgtagttatctacacgacggggagtcaggcaactatggatgaacgaaatagacagatcgctgagataggtgcctcactgattaagcattggtaactgtcagaccaagtttactcatatatactttagattgatttaaaacttcatttttaatttaaaaggatctaggtgaagatcctttttgataatctcatgaccaaaatcccttaacgtgagttttcgttccactgagcgtcagaccccgtagaaaagatcaaaggatcttcttgagatcctttttttctgcgcgtaatctgctgcttgcaaacaaaaaaaccaccgctaccagcggtggtttgtttgccggatcaagagctaccaactctttttccgaaggtaactggcttcagcagagcgcagataccaaatactgttcttctagtgtagccgtagttaggccaccacttcaagaactctgtagcaccgcctacatacctcgctctgctaatcctgttaccagtggctgctgccagtggcgataagtcgtgtcttaccgggttggactcaagacgatagttaccggataaggcgcagcggtcgggctgaacggggggttcgtgcacacagcccagcttggagcgaacgacctacaccgaactgagatacctacagcgtgagctatgagaaagcgccacgcttcccgaagggagaaaggcggacaggtatccggtaagcggcagggtcggaacaggagagcgcacgagggagcttccagggggaaacgcctggtatctttatagtcctgtcgggtttcgccacctctgacttgagcgtcgatttttgtgatgctcgtcaggggggcggagcctatggaaaaacgccagcaacgcggcctttttacggttcctggccttttgctggccttttgctcacatgttctttcctgcgttatcccctgattctgtggataaccgtattaccgcctttgagtgagctgataccgctcgccgcagccgaacgaccgagcgcagcgagtcagtgagcgaggaagcggaagagcgcccaatacgcaaaccgcctctccccgcgcgttggccgattcattaatgcagctggcacgacaggtttcccgactggaaagcgggcagtgagcgcaacgcaattaatgtgagttagctcactcattaggcaccccaggctttacactttatgcttccggctcgtatgttgtgtggaattgtgagcggataacaatttcacacaggaaacagctatgaccatgattacgccaacgtttaataaataataaataataaaataaaaaataaaaaataaataagatacattgatgagtttggacaaaccacaactagaatgcagtgaaaaaaatgctttatttgtgaaatttgtgatgctattgctttatttgtaaccattataagctgcaataaacaagttaagctttgtcgctgcaaccatagtttgacataatgcaaccataccttgacataattaaagtcatactctgacataaagcccccactggattgtacaattacgatcagcatgctcgaactgcttactggctttaagtttgtacaaaaaagagggagtgtgtattaagtaggtgcctgacctcttctcttcctcccacagggcctcgagagatctggcagcggagagggcagaggaagtctgctaacatgcggtgacgtcgaggagaatcctggccctaggctcgagatgaccgagtacaagcccacggtgcgcctcgccacccgcgacgacgtccccagggccgtacgcaccctcgccgccgcgttcgccgactaccccgccacgcgccacaccgtcgatccggaccgccacatcgagcgggtcaccgagctgcaagaactcttcctcacgcgcgtcgggctcgacatcggcaaggtgtgggtcgcggacgacggcgccgcggtggcggtctggaccacgccggagagcgtcgaagcgggggcggtgttcgccgagatcggcccgcgcatggccgagttgagcggttcccggctggccgcgcagcaacagatggaaggcctcctggcgccgcaccggcccaaggagcccgcgtggttcctggccaccgtcggagtctcgcccgaccaccagggcaagggtctgggcagcgccgtcgtgctccccggagtggaggcggccgagcgcgccggggtgcccgccttcctggagacctccgcgccccgcaacctccccttctacgagcggctcggcttcaccgtcaccgccgacgtcgaggtgcccgaaggaccgcgcacctggtgcatgacccgcaagcccggtgccggcagtggagagggcagaggaagtctgctaacatgcggtgacgtcgaggagaatcctggcccagtgagcaagggcgaggagctgttcaccggggtggtgcccatcctggtcgagctggacggcgacgtaaacggccacaagttcagcgtgtccggcgagggcgagggcgatgccacctacggcaagctgaccctgaagttcatctgcaccaccggcaagctgcccgtgccctggcccaccctcgtgaccaccctgacctacggcgtgcagtgcttcagccgctaccccgaccacatgaagcagcacgacttcttcaagtccgccatgcccgaaggctacgtccaggagcgcaccatcttcttcaaggacgacggcaactacaagacccgcgccgaggtgaagttcgagggcgacaccctggtgaaccgcatcgagctgaagggcatcgacttcaaggaggacggcaacatcctggggcacaagctggagtacaactacaacagccacaacgtctatatcatggccgacaagcagaagaacggcatcaaggtgaacttcaagatccgccacaacatcgaggacggcagcgtgcagctcgccgaccactaccagcagaacacccccatcggcgacggccccgtgctgctgcccgacaaccactacctgagcacccagtgcgccctgagcaaagaccccaacgagaagcgcgatcacatggtcctgctggagttcgtgaccgccgccgggatcactctcggcatggacgagctgtacaaggaattctaactagagctcgctgatcagcctcgactgtgccttttagttgccagccatctgttgtttgcccctcccccgtgccttccttgaccctggaaggtgccactcccactgtcctttcctaataaaatgaggaaattgcatcgcattgtctgagtaggtgtcattctattctggggggtggggtggggcaggacagcaagggggaggattgggaagagaatagcaggcatgctggggatcgaagacacagtcggctggtttttttgtttttagcgttataacttttatttcactatgtcactgtatggttgcattttatgtcagtgaatggttgcaggttttttgtaagttattgatatgcctatccagtgtatgtcacgctttgcttgcagcgacaggtaccgagctcgaattcactggccgtcgttttacaacgtcgtgactgggaaaaccctggcgttacccaacttaatcgccttgcagcacatccccctttcgccagctggcgtaatagcgaagaggcccgcaccgatcgcccttcccaacagttgcgcagcctgaatggcgaatggcgcctgatgcggtattttctccttacgcatctgtgcggtatttcacaccgcatatggtgcactctcagtacaatctgctctgatgccgcatagttaagccagccccgacacccgccaacacccgctgacgcgccctgacgggcttgtctgctcccggcatccgcttacagacaagctgtgaccgtctccgggagctgcatgtgtcagaggttttcaccgtcatcaccgaaacgcgcgagacgaaagggcctcgtgatacgcctatttttataggttaatgtcatgataataatggtttcttagacgtcaggtggcacttttcggggaaatgtgcgcggaacccctatttgtttatttttctaaatacattcaaatatgtatccgctcatgagacaataaccctgataaatgcttcaataatattgaaaaaggaagagtatgagtattcaacatttccgtgtcgcccttattcccttttttgcggcattttgccttcctgtttttgctcacccagaaacgctggtgaaagtaaaagatgctgaagatcagttgggtgcacgagtgggttacatcgaactggatctcaacagcggtaagatccttgagagttttcgccccgaagaacgttttccaatgatgagcacttttaaagttctgctatgtggcgcggtattatcccgtattgacgccgggcaagagcaactcggtcgccgcatacactattctcagaatgacttggttgagtactcaccagtcacagaaaagcatcttacggatggcatgacagtaagagaattatgcagtgctgccataaccatgagtgataacactgcggccaacttacttctgacaacgatcggaggaccgaaggagctaaccgcttttttgcacaacatgggggatcatgtaactcgccttgatcgttgggaaccggagctgaatgaagccataccaaacgacgagcgtgacaccacgatgcctgtagcaatggcaacaacgttgcgcaaactattaactggcgaactacttactctagcttcccggcaacaattaatagactggatggaggcggataaagttgcaggaccacttctgcgctcggcccttccggctggctggtttattgctgataaatctggagccggtgagcgtgggtctcgcggtatcattgcagcactggggc

SEQ ID NO: 269 - DNA, 4872 bp, Artificial Sequence
  Synthetic
gaggaccgaaggagctaaccgcttttttgcacaacatgggggatcatgtaactcgccttgatcgttgggaaccggagctgaatgaagccataccaaacgacgagcgtgacaccacgatgcctgtagcaatggcaacaacgttgcgcaaactattaactggcgaactacttactctagcttcccggcaacaattaatagactggatggaggcggataaagttgcaggaccacttctgcgctcggcccttccggctggctggtttattgctgataaatctggagccggtgagcgtgggtctcgcggtatcattgcagcactggggccagatggtaagccctcccgtatcgtagttatctacacgacggggagtcaggcaactatggatgaacgaaatagacagatcgctgagataggtgcctcactgattaagcattggtaactgtcagaccaagtttactcatatatactttagattgatttaaaacttcatttttaatttaaaaggatctaggtgaagatcctttttgataatctcatgaccaaaatcccttaacgtgagttttcgttccactgagcgtcagaccccgtagaaaagatcaaaggatcttcttgagatcctttttttctgcgcgtaatctgctgcttgcaaacaaaaaaaccaccgctaccagcggtggtttgtttgccggatcaagagctaccaactctttttccgaaggtaactggcttcagcagagcgcagataccaaatactgttcttctagtgtagccgtagttaggccaccacttcaagaactctgtagcaccgcctacatacctcgctctgctaatcctgttaccagtggctgctgccagtggcgataagtcgtgtcttaccgggttggactcaagacgatagttaccggataaggcgcagcggtcgggctgaacggggggttcgtgcacacagcccagcttggagcgaacgacctacaccgaactgagatacctacagcgtgagctatgagaaagcgccacgcttcccgaagggagaaaggcggacaggtatccggtaagcggcagggtcggaacaggagagcgcacgagggagcttccagggggaaacgcctggtatctttatagtcctgtcgggtttcgccacctctgacttgagcgtcgatttttgtgatgctcgtcaggggggcggagcctatggaaaaacgccagcaacgcggcctttttacggttcctggccttttgctggccttttgctcacatgttctttcctgcgttatcccctgattctgtggataaccgtattaccgcctttgagtgagctgataccgctcgccgcagccgaacgaccgagcgcagcgagtcagtgagcgaggaagcggaagagcgcccaatacgcaaaccgcctctccccgcgcgttggccgattcattaatgcagctggcacgacaggtttcccgactggaaagcgggcagtgagcgcaacgcaattaatgtgagttagctcactcattaggcaccccaggctttacactttatgcttccggctcgtatgttgtgtggaattgtgagcggataacaatttcacacaggaaacagctatgaccatgattacgccaacgtttaataaataataaataataaaataaaaaataaaaaataaataagatacattgatgagtttggacaaaccacaactagaatgcagtgaaaaaaatgctttatttgtgaaatttgtgatgctattgctttatttgtaaccattataagctgcaataaacaagttaagctttgtcgctgcaaccatagtttgacataatgcaaccataccttgacataattaaagtcatactctgacataaagcccccactggattgtacaattacgatcagcatgctcgaactgcttactggctttaagtttgtacaaaaaagagctctctccttgccagaacctctgacctcttctcttcctcccacagggcctcgagagatctggcagcggagagggcagaggaagtctgctaacatgcggtgacgtcgaggagaatcctggccctaggctcgagatgaccgagtacaagcccacggtgcgcctcgccacccgcgacgacgtccccagggccgtacgcaccctcgccgccgcgttcgccgactaccccgccacgcgccacaccgtcgatccggaccgccacatcgagcgggtcaccgagctgcaagaactcttcctcacgcgcgtcgggctcgacatcggcaaggtgtgggtcgcggacgacggcgccgcggtggcggtctggaccacgccggagagcgtcgaagcgggggcggtgttcgccgagatcggcccgcgcatggccgagttgagcggttcccggctggccgcgcagcaacagatggaaggcctcctggcgccgcaccggcccaaggagcccgcgtggttcctggccaccgtcggagtctcgcccgaccaccagggcaagggtctgggcagcgccgtcgtgctccccggagtggaggcggccgagcgcgccggggtgcccgccttcctggagacctccgcgccccgcaacctccccttctacgagcggctcggcttcaccgtcaccgccgacgtcgaggtgcccgaaggaccgcgcacctggtgcatgacccgcaagcccggtgccggcagtggagagggcagaggaagtctgctaacatgcggtgacgtcgaggagaatcctggcccagtgagcaagggcgaggagctgttcaccggggtggtgcccatcctggtcgagctggacggcgacgtaaacggccacaagttcagcgtgtccggcgagggcgagggcgatgccacctacggcaagctgaccctgaagttcatctgcaccaccggcaagctgcccgtgccctggcccaccctcgtgaccaccctgacctacggcgtgcagtgcttcagccgctaccccgaccacatgaagcagcacgacttcttcaagtccgccatgcccgaaggctacgtccaggagcgcaccatcttcttcaaggacgacggcaactacaagacccgcgccgaggtgaagttcgagggcgacaccctggtgaaccgcatcgagctgaagggcatcgacttcaaggaggacggcaacatcctggggcacaagctggagtacaactacaacagccacaacgtctatatcatggccgacaagcagaagaacggcatcaaggtgaacttcaagatccgccacaacatcgaggacggcagcgtgcagctcgccgaccactaccagcagaacacccccatcggcgacggccccgtgctgctgcccgacaaccactacctgagcacccagtgcgccctgagcaaagaccccaacgagaagcgcgatcacatggtcctgctggagttcgtgaccgccgccgggatcactctcggcatggacgagctgtacaaggaattctaactagagctcgctgatcagcctcgactgtgccttctagttgccagccatctgttgtttgcccctcccccgtgccttccttgaccctggaaggtgccactcccactgtcctttcctaataaaatgaggaaattgcatcgcattgtctgagtaggtgtcattctattctggggggtggggtggggcaggacagcaagggggaggattgggaagagaatagcaggcatgctggggatcgaagacacagtcggctggtttttttgtttttagcgttataacttttatttcactatgtcactgtatggttgcattttatgtcagtgaatggttgcaggttttttgtaagttattgatatgcctatccagtgtatgtcacgctttgcttgcagcgacaggtaccgagctcgaattcactggccgtcgttttacaacgtcgtgactgggaaaaccctggcgttacccaacttaatcgccttgcagcacatccccctttcgccagctggcgtaatagcgaagaggcccgcaccgatcgcccttcccaacagttgcgcagcctgaatggcgaatggcgcctgatgcggtattttctccttacgcatctgtgcggtatttcacaccgcatatggtgcactctcagtacaatctgctctgatgccgcatagttaagccagccccgacacccgccaacacccgctgacgcgccctgacgggcttgtctgctcccggcatccgcttacagacaagctgtgaccgtctccgggagctgcatgtgtcagaggttttcaccgtcatcaccgaaacgcgcgagacgaaagggcctcgtgatacgcctatttttataggttaatgtcatgataataatggtttcttagacgtcaggtggcacttttcggggaaatgtgcgcggaacccctatttgtttatttttctaaatacattcaaatatgtatccgctcatgagacaataaccctgataaatgcttcaataatattgaaaaaggaagagtatgagtattcaacatttccgtgtcgcccttattcccttttttgcggcattttgccttcctgtttttgctcacccagaaacgctggtgaaagtaaaagatgctgaagatcagttgggtgcacgagtgggttacatcgaactggatctcaacagcggtaagatccttgagagttttcgccccgaagaacgttttccaatgatgagcacttttaaagttctgctatgtggcgcggtattatcccgtattgacgccgggcaagagcaactcggtcgccgcatacactattctcagaatgacttggttgagtactcaccagtcacagaaaagcatcttacggatggcatgacagtaagagaattatgcagtgctgccataaccatgagtgataacactgcggccaacttacttctgacaacgatcg

SEQ ID NO: 270 - DNA, 4438 bp, Artificial Sequence
  Synthetic
agttgcgcagcctgaatggcgaatggcgcctgatgcggtattttctccttacgcatctgtgcggtatttcacaccgcatatggtgcactctcagtacaatctgctctgatgccgcatagttaagccagccccgacacccgccaacacccgctgacgcgccctgacgggcttgtctgctcccggcatccgcttacagacaagctgtgaccgtctccgggagctgcatgtgtcagaggttttcaccgtcatcaccgaaacgcgcgagacgaaagggcctcgtgatacgcctatttttataggttaatgtcatgataataatggtttcttagacgtcaggtggcacttttcggggaaatgtgcgcggaacccctatttgtttatttttctaaatacattcaaatatgtatccgctcatgagacaataaccctgataaatgcttcaataatattgaaaaaggaagagtatgagtattcaacatttccgtgtcgcccttattcccttttttgcggcattttgccttcctgtttttgctcacccagaaacgctggtgaaagtaaaagatgctgaagatcagttgggtgcacgagtgggttacatcgaactggatctcaacagcggtaagatccttgagagttttcgccccgaagaacgttttccaatgatgagcacttttaaagttctgctatgtggcgcggtattatcccgtattgacgccgggcaagagcaactcggtcgccgcatacactattctcagaatgacttggttgagtactcaccagtcacagaaaagcatcttacggatggcatgacagtaagagaattatgcagtgctgccataaccatgagtgataacactgcggccaacttacttctgacaacgatcggaggaccgaaggagctaaccgcttttttgcacaacatgggggatcatgtaactcgccttgatcgttgggaaccggagctgaatgaagccataccaaacgacgagcgtgacaccacgatgcctgtagcaatggcaacaacgttgcgcaaactattaactggcgaactacttactctagcttcccggcaacaattaatagactggatggaggcggataaagttgcaggaccacttctgcgctcggcccttccggctggctggtttattgctgataaatctggagccggtgagcgtgggtctcgcggtatcattgcagcactggggccagatggtaagccctcccgtatcgtagttatctacacgacggggagtcaggcaactatggatgaacgaaatagacagatcgctgagataggtgcctcactgattaagcattggtaactgtcagaccaagtttactcatatatactttagattgatttaaaacttcatttttaatttaaaaggatctaggtgaagatcctttttgataatctcatgaccaaaatcccttaacgtgagttttcgttccactgagcgtcagaccccgtagaaaagatcaaaggatcttcttgagatcctttttttctgcgcgtaatctgctgcttgcaaacaaaaaaaccaccgctaccagcggtggtttgtttgccggatcaagagctaccaactctttttccgaaggtaactggcttcagcagagcgcagataccaaatactgttcttctagtgtagccgtagttaggccaccacttcaagaactctgtagcaccgcctacatacctcgctctgctaatcctgttaccagtggctgctgccagtggcgataagtcgtgtcttaccgggttggactcaagacgatagttaccggataaggcgcagcggtcgggctgaacggggggttcgtgcacacagcccagcttggagcgaacgacctacaccgaactgagatacctacagcgtgagctatgagaaagcgccacgcttcccgaagggagaaaggcggacaggtatccggtaagcggcagggtcggaacaggagagcgcacgagggagcttccagggggaaacgcctggtatctttatagtcctgtcgggtttcgccacctctgacttgagcgtcgatttttgtgatgctcgtcaggggggcggagcctatggaaaaacgccagcaacgcggcctttttacggttcctggccttttgctggccttttgctcacatgtatcagcacacaattgcccattatacgcgcgtataatggactattgtgtgctgataagctttgtcgctgcaaccatagtttgacataatgcaaccataccttgacataattaaagtcatactctgacataaagcccgatcagcattagcaagacggctcacgagatggagccagagaggatcctggatcgtgtcttcgactgacctcttctcttcctcccacagggcctcgagagatctggcagcggagagggcagaggaagtctgctaacatgcggtgacgtcgaggagaatcctggccctaggctcgagatgaccgagtacaagcccacggtgcgcctcgccacccgcgacgacgtccccagggccgtacgcaccctcgccgccgcgttcgccgactaccccgccacgcgccacaccgtcgatccggaccgccacatcgagcgggtcaccgagctgcaagaactcttcctcacgcgcgtcgggctcgacatcggcaaggtgtgggtcgcggacgacggcgccgcggtggcggtctggaccacgccggagagcgtcgaagcgggggcggtgttcgccgagatcggcccgcgcatggccgagttgagcggttcccggctggccgcgcagcaacagatggaaggcctcctggcgccgcaccggcccaaggagcccgcgtggttcctggccaccgtcggagtctcgcccgaccaccagggcaagggtctgggcagcgccgtcgtgctccccggagtggaggcggccgagcgcgccggggtgcccgccttcctggagacctccgcgccccgcaacctccccttctacgagcggctcggcttcaccgtcaccgccgacgtcgaggtgcccgaaggaccgcgcacctggtgcatgacccgcaagcccggtgccggcagtggagagggcagaggaagtctgctaacatgcggtgacgtcgaggagaatcctggcccagtgagcaagggcgaggagctgttcaccggggtggtgcccatcctggtcgagctggacggcgacgtaaacggccacaagttcagcgtgtccggcgagggcgagggcgatgccacctacggcaagctgaccctgaagttcatctgcaccaccggcaagctgcccgtgccctggcccaccctcgtgaccaccctgacctacggcgtgcagtgcttcagccgctaccccgaccacatgaagcagcacgacttcttcaagtccgccatgcccgaaggctacgtccaggagcgcaccatcttcttcaaggacgacggcaactacaagacccgcgccgaggtgaagttcgagggcgacaccctggtgaaccgcatcgagctgaagggcatcgacttcaaggaggacggcaacatcctggggcacaagctggagtacaactacaacagccacaacgtctatatcatggccgacaagcagaagaacggcatcaaggtgaacttcaagatccgccacaacatcgaggacggcagcgtgcagctcgccgaccactaccagcagaacacccccatcggcgacggccccgtgctgctgcccgacaaccactacctgagcacccagtccgccctgagcaaagaccccaacgagaagcgcgatcacatggtcctgctggagttcgtgaccgccgccgggatcactctcggcatggacgagctgtacaaggaattctaactagagctcgctgatcagcctcgactgtgccttctagttgccagccatctgttgtttgcccctcccccgtgccttccttgaccctggaaggtgccactcccactgtcctttcctaataaaatgaggaaattgcatcgcattgtctgagtaggtgtcattctattctggggggtggggtggggcaggacagcaagggggaggattgggaagagaatagcaggcatgctggggatcgaagacacagtcggctggtttttttgtttttagcgttataacttttatttcactatgtcactgtatggttgcattttatgtcagtgaatggttgcaggttttttgtaagttattgatatgcctatccagtgtatgtcacgctttgcttgcagcgacaggtactatcagcacacaatagtccattatacgcgcgtataatgggcaattgtgtgctgatagtaccgagctcgaattcactggccgtcgttttacaacgtcgtgactgggaaaaccctggcgttacccaacttaatcgccttgcagcacatccccctttcgccagctggcgtaatagcgaagaggcccgcaccgatcgcccttcccaac

SEQ ID NO: 271 - DNA, 6762 bp, Artificial Sequence
  Synthetic
gcaaccaggtgtggaaagtccccaggctccccagcaggcagaagtatgcaaagcatgcatctcaattagtcagcaaccatagtcccgcccctaactccgcccatcccgcccctaactccgcccagttccgcccattctccgccccatggctgactaattttttttatttatgcagaggccgaggccgcctctgcctctgagctattccagaagtagtgaggaggcttttttggaggcctaggcttttgcaaaaagctcccgggagcttgtatatccattttcggatctgatcaagagacaggatgaggatcgtttcgcatgattgaacaagatggattgcacgcaggttctccggccgcttgggtggagaggctattcggctatgactgggcacaacagacaatcggctgctctgatgccgccgtgttccggctgtcagcgcaggggcgcccggttctttttgtcaagaccgacctgtccggtgccctgaatgaactgcaggacgaggcagcgcggctatcgtggctggccacgacgggcgttccttgcgcagctgtgctcgacgttgtcactgaagcgggaagggactggctgctattgggcgaagtgccggggcaggatctcctgtcatctcaccttgctcctgccgagaaagtatccatcatggctgatgcaatgcggcggctgcatacgcttgatccggctacctgcccattcgaccaccaagcgaaacatcgcatcgagcgagcacgtactcggatggaagccggtcttgtcgatcaggatgatctggacgaagagcatcaggggctcgcgccagccgaactgttcgccaggctcaaggcgcgcatgcccgacggcgaggatctcgtcgtgacccatggcgatgcctgcttgccgaatatcatggtggaaaatggccgcttttctggattcatcgactgtggccggctgggtgtggcggaccgctatcaggacatagcgttggctacccgtgatattgctgaagagcttggcggcgaatgggctgaccgcttcctcgtgctttacggtatcgccgctcccgattcgcagcgcatcgccttctatcgccttcttgacgagttcttctgagcgggactctggggttcgaaatgaccgaccaagcgacgcccaacctgccatcacgagatttcgattccaccgccgccttctatgaaaggttgggcttcggaatcgttttccgggacgccggctggatgatcctccagcgcggggatctcatgctggagttcttcgcccaccccaacttgtttattgcagcttataatggttacaaataaagcaatagcatcacaaatttcacaaataaagcatttttttcactgcattctagttgtggtttgtccaaactcatcaatgtatcttatcatgtctgtataccgtcgacctctagctagagcttggcgtaatcatggtcatagctgtttcctgtgtgaaattgttatccgctcacaattccacacaacatacgagccggaagcataaagtgtaaagcctggggtgcctaatgagtgagctaactcacattaattgcgttgcgctcactgcccgctttccagtcgggaaacctgtcgtgccagctgcattaatgaatcggccaacgcgcggggagaggcggtttgcgtattgggcgctcttccgcttcctcgctcactgactcgctgcgctcggtcgttcggctgcggcgagcggtatcagctcactcaaaggcggtaatacggttatccacagaatcaggggataacgcaggaaagaacatgtgagcaaaaggccagcaaaaggccaggaaccgtaaaaaggccgcgttgctggcgtttttccataggctccgcccccctgacgagcatcacaaaaatcgacgctcaagtcagaggtggcgaaacccgacaggactataaagataccaggcgtttccccctggaagctccctcgtgcgctctcctgttccgaccctgccgcttaccggatacctgtccgcctttctcccttcgggaagcgtggcgctttctcatagctcacgctgtaggtatctcagttcggtgtaggtcgttcgctccaagctgggctgtgtgcacgaaccccccgttcagcccgaccgctgcgccttatccggtaactatcgtcttgagtccaacccggtaagacacgacttatcgccactggcagcagccactggtaacaggattagcagagcgaggtatgtaggcggtgctacagagttcttgaagtggtggcctaactacggctacactagaagaacagtatttggtatctgcgctctgctgaagccagttaccttcggaaaaagagttggtagctcttgatccggcaaacaaaccaccgctggtagcggtttttttgtttgcaagcagcagattacgcgcagaaaaaaaggatctcaagaagatcctttgatcttttctacggggtctgacgctcagtggaacgaaaactcacgttaagggattttggtcatgagattatcaaaaaggatcttcacctagatccttttaaattaaaaatgaagttttaaatcaatctaaagtatatatgagtaaacttggtctgacagttaccaatgcttaatcagtgaggcacctatctcagcgatctgtctatttcgttcatccatagttgcctgactccccgtcgtgtagataactacgatacgggagggcttaccatctggccccagtgctgcaatgataccgcgagacccacgctcaccggctccagatttatcagcaataaaccagccagccggaagggccgagcgcagaagtggtcctgcaactttatccgcctccatccagtctattaattgttgccgggaagctagagtaagtagttcgccagttaatagtttgcgcaacgttgttgccattgctacaggcatcgtggtgtcacgctcgtcgtttggtatggcttcattcagctccggttcccaacgatcaaggcgagttacatgatcccccatgttgtgcaaaaaagcggttagctccttcggtcctccgatcgttgtcagaagtaagttggccgcagtgttatcactcatggttatggcagcactgcataattctcttactgtcatgccatccgtaagatgcttttctgtgactggtgagtactcaaccaagtcattctgagaatagtgtatgcggcgaccgagttgctcttgcccggcgtcaatacgggataataccgcgccacatagcagaactttaaaagtgctcatcattggaaaacgttcttcggggcgaaaactctcaaggatcttaccgctgttgagatccagttcgatgtaacccactcgtgcacccaactgatcttcagcatcttttactttcaccagcgtttctgggtgagcaaaaacaggaaggcaaaatgccgcaaaaaagggaataagggcgacacggaaatgttgaatactcatactcttcctttttcaatattattgaagcatttatcagggttattgtctcatgagcggatacatatttgaatgtatttagaaaaataaacaaataggggttccgcgcacatttccccgaaaagtgccacctgacgtcgacggatcgggagatctcccgatcccctatggtgcactctcagtacaatctgctctgatgccgcatagttaagccagtatctgctccctgcttgtgtgttggaggtcgctgagtagtgcgcgagcaaaatttaagctacaacaaggcaaggcttgaccgacaattgcatgaagaatctgcttagggttaggcgttttgcgctgcttcgcgatgtacgggccagatatacgcgttgacattgattattgactagttattaatagtaatcaattacggggtcattagttcatagcccatatatggagttccgcgttacataacttacggtaaatggcccgcctggctgaccgcccaacgacccccgcccattgacgtcaataatgacgtatgttcccatagtaacgccaatagggactttccattgacgtcaatgggtggagtatttacggtaaactgcccacttggcagtacatcaagtgtatcatatgccaagtacgccccctattgacgtcaatgacggtaaatggcccgcctggcattatgcccagtacatgaccttatgggactttcctacttggcagtacatctacgtattagtcatcgctattaccatggtgatgcggttttggcagtacatcaatgggcgtggatagcggtttgactcacggggatttccaagtctccaccccattgacgtcaatgggagtttgttttggcaccaaaatcaacgggactttccaaaatgtcgtaacaactccgccccattgacgcaaatgggcggtaggcgtgtacggtgggaggtctatataagcagagctctctggctaactagagaacccactgcttactggcttatcgaaattaatacgactcactatagggagacccaagctggctagcgtttaaacttaagcttggtaccgagctcggatccgccaccatgggcaaacggacagccgacggaagcgagttcgagtcaccgaaaaagaagcgaaaagttggctccggagactacaaggaccacgacggtgactacaaggaccacgacatcgactacaaggacgacgacgacaagtccggaatggccttcctgttttctcccaaggcccgggcctttagcgacgagtccctggagtcttatctgctgagagtggtgagcgagaatttctttgatagctacgagggcctgtccctggccatcagggaggagctgcacgagctggactttgaggcacacggagcattcccagtggacctgaagcggctgaacgtgtaccacgccaagcacaactctcacttcagaatgagagccctgggactgctggagaccctgctggacctgccccggtatgagctgcagaagctggccctgctgaagagcgatatcaagtttaacagctccgtggccctgtacaacaatggcgtggacatccctctgaggttcatcaggcaccacgcagaggaggcagtggattctatcccagtgtgcagccagtgtctggccgaggaggcctacatcaagcagtcctggcacatcaagtgggtgaatgcctgcaccaagcaccagtgtgccctgctgcacaactgccccgagtgttacgcccctatcaactatatcgagaatgagtccatcacacactgctcttgtggctttgagctgagctgcgcctctaccagccccgtgaatacactgtccatcgagcacctgaacaagctgctggacaagggcgagaggaacgattccaatcctctgtttaacaatatgaccctgacagagaggttcgccgccctgctgtggtatcaggagcggtactctcagaccgacaacttctgcctgaatgatgccgtgaactactttagcaagtggcctgccgtgttcaatacagagctggacgagctgtccaagaacgccgagatgaagctgatcgatctgtttaacaagaccgagttcaagtttatcttcggcgacgccatcctggcctgtccaagcacacagaagcagtccgagtctcacttcatctacagggccctgctggactatctggtgaccctggtggagtccaatccaaagacaaagaagcccaacgccgccgatctgctggtgtctgtgctggaggcagccaccctgctgggcacaagcgtggagcaggtgtaccgcctgtatcagaatggcatcctgcagaccgcctttcggcacaagatgaatcagagaatcaacccttacaagggcgccttctttctgaggcacgtgatcgagtataagacatccttcggcaacgataaggcccgcatgtacctgtctgcctggtgagcggccgctcgagtctagagggcccgtttaaacccgctgatcagcctcgactgtgccttctagttgccagccatctgttgtttgcccctcccccgtgccttccttgaccctggaaggtgccactcccactgtcctttcctaataaaatgaggaaattgcatcgcattgtctgagtaggtgtcattctattctggggggtggggtggggcaggacagcaagggggaggattgggaagacaatagcaggcatgctggggatgcggtgggctctatggcttctgaggcggaaagaaccagctggggctctagggggtatccccacgcgccctgtagcggcgcattaagcgcggcgggtgtggtggttacgcgcagcgtgaccgctacacttgccagcgccctagcgcccgctcctttcgctttcttcccttcctttctcgccacgttcgccggctttccccgtcaagctctaaatcgggggctccctttagggttccgatttagtgctttacggcacctcgaccccaaaaaacttgattagggtgatggttcacgtagtgggccatcgccctgatagacggtttttcgccctttgacgttggagtccacgttctttaatagtggactcttgttccaaactggaacaacactcaaccctatctcggtctattcttttgatttataagggattttgccgatttcggcctattggttaaaaaatgagctgatttaacaaaaatttaacgcgaattaattctgtggaatgtgtgtcagttagggtgtggaaagtccccaggctccccagcaggcagaagtatgcaaagcatgcatctcaattagtca

SEQ ID NO: 272 - DNA, 4810 bp, Artificial Sequence
  Synthetic
ttgcccggcgtcaatacgggataataccgcgccacatagcagaactttaaaagtgctcatcattggaaaacgttcttcggggcgaaaactctcaaggatcttaccgctgttgagatccagttcgatgtaacccactcgtgcacccaactgatcttcagcatcttttactttcaccagcgtttctgggtgagcaaaaacaggaaggcaaaatgccgcaaaaaagggaataagggcgacacggaaatgttgaatactcatactcttcctttttcattattattgaagcatttatcagggttattgtctcatgagcggatacatatttgaatgtatttagaaaaataaacaaataggggttccgcgcacatttccccgaaaagtgccacctgacgtcgacggatcgggagatctcccgatcccctatggtcgactctcagtacaatctgctctgatgccgcatagttaagccagtatctgctccctgcttgtgtgttggaggtcgctgagtagtgcgcgagcaaaatttaagctacaacaaggcaaggcttgaccgacaattgcatgaagaatctgcttagggttaggcgttttgcgctgcttcgcgatgtacgggccagatatacgcgagggcctatttcccatgattccttcatatttgcatatacgatacaaggctgttagagagataattagaattaatttgactgtaaacacaaagatattagtacaaaatacgtgacgtagaaagtaataatttcttgggtagtttgcagttttaaaattatgttttaaaatggactatcatatgcttaccgtaacttgaaagtatttcgatttcttggctttatatatcttgtggaaaggacgaaacaccgtaatacgactcactatagggtctagaattcctgtgacctgccgtataggcagctgaagataatgcaggcaaatcaaccttagtctgaaggcctaggcaaagaagtaattctgccgaaaaggcagtgagtagtgtagcggccgctttttttcttctgaggcggaaagaaccagctggggctctagggggtatccccacgcgccctgtagcggcgcattaagcgcggcgggtgtggtggttacgcgcagcgtgaccgctacacttgccagcgccctagcgcccgctcctttcgctttcttcccttcctttctcgccacgttcgccggctttccccgtcaagctctaaatcgggggctccctttagggttccgatttagtgctttacggcacctcgaccccaaaaaacttgattagggtgatggttcacgtagtgggccatcgccctgatagacggtttttcgccctttgacgttggagtccacgttctttaatagtggactcttgttccaaactggaacaacactcaaccctatctcggtctattcttttgatttataagggattttgccgatttcggcctattggttaaaaaatgagctgatttaacaaaaatttaacgcgaattaattctgtggaatgtgtgtcagttagggtgtggaaagtccccaggctccccagcaggcagaagtatgcaaagcatgcatctcaattagtcagcaaccaggtgtggaaagtccccaggctccccagcaggcagaagtatgcaaagcatgcatctcaattagtcagcaaccatagtcccgcccctaactccgcccatcccgcccctaactccgcccagttccgcccattctccgccccatggctgactaattttttttatttatgcagaggccgaggccgcctctgcctctgagctattccagaagtagtgaggaggcttttttggaggcctaggcttttgcaaaaagctcccgggagcttgtatatccattttcggatctgatcaagagacaggatgaggatcgtttcgcatgattgaacaagatggattgcacgcaggttctccggccgcttgggtggagaggctattcggctatgactgggcacaacagacaatcggctgctctgatgccgccgtgttccggctgtcagcgcaggggcgcccggttctttttgtcaagaccgacctgtccggtgccctgaatgaactgcaggacgaggcagcgcggctatcgtggctggccacgacgggcgttccttgcgcagctgtgctcgacgttgtcactgaagcgggaagggactggctgctattgggcgaagtgccggggcaggatctcctgtcatctcaccttgctcctgccgagaaagtatccatcatggctgatgcaatgcggcggctgcatacgcttgatccggctacctgcccattcgaccaccaagcgaaacatcgcatcgagcgagcacgtactcggatggaagccggtcttgtcgatcaggatgatctggacgaagagcatcaggggctcgcgccagccgaactgttcgccaggctcaaggcgcgcatgcccgacggcgaggatctcgtcgtgacccatggcgatgcctgcttgccgaatatcatggtggaaaatggccgcttttctggattcatcgactgtggccggctgggtgtggcggaccgctatcaggacatagcgttggctacccgtgatattgctgaagagcttggcggcgaatgggctgaccgcttcctcgtgctttacggtatcgccgctcccgattcgcagcgcatcgccttctatcgccttcttgacgagttcttctgagcgggactctggggttcgaaatgaccgaccaagcgacgcccaacctgccatcacgagatttcgattccaccgccgccttctatgaaaggttgggcttcggaatcgttttccgggacgccggctggatgatcctccagcgcggggatctcatgctggagttcttcgcccaccccaacttgtttattgcagcttataatggttacaaataaagcaatagcatcacaaatttcacaaataaagcatttttttcactgcattctagttgtggtttgtccaaactcatcaatgtatcttatcatgtctgtataccgtcgacctctagctagagcttggcgtaatcatggtcatagctgtttcctgtgtgaaattgttatccgctcacaattccacacaacatacgagccggaagcataaagtgtaaagcctggggtgcctaatgagtgagctaactcacattaattgcgttgcgctcactgcccgctttccagtcgggaaacctgtcgtgccagctgcattaatgaatcggccaacgcgcggggagaggcggtttgcgtattgggcgctcttccgcttcctcgctcactgactcgctgcgctcggtcgttcggctgcggcgagcggtatcagctcactcaaaggcggtaatacggttatccacagaatcaggggataacgcaggaaagaacatgtgagcaaaaggccagcaaaaggccaggaaccgtaaaaaggccgcgttgctggcgtttttccataggctccgcccccctgacgagcatcacaaaaatcgacgctcaagtcagaggtggcgaaacccgacaggactataaagataccaggcgtttccccctggaagctccctcgtgcgctctcctgttccgaccctgccgcttaccggatacctgtccgcctttctcccttcgggaagcgtggcgctttctcaatgctcacgctgtaggtatctcagttcggtgtaggtcgttcgctccaagctgggctgtgtgcacgaaccccccgttcagcccgaccgctgcgccttatccggtaactatcgtcttgagtccaacccggtaagacacgacttatcgccactggcagcagccactggtaacaggattagcagagcgaggtatgtaggcggtgctacagagttcttgaagtggtggcctaactacggctacactagaaggacagtatttggtatctgcgctctgctgaagccagttaccttcggaaaaagagttggtagctcttgatccggcaaacaaaccaccgctggtagcggtggtttttttgtttgcaagcagcagattacgcgcagaaaaaaaggatctcaagaagatcctttgatcttttctacggggtctgacgctcagtggaacgaaaactcacgttaagggattttggtcatgagattatcaaaaaggatcttcacctagatccttttaaattaaaaatgaagttttaaatcaatctaaagtatatatgagtaaacttggtctgacagttaccaatgcttaatcagtgaggcacctatctcagcgatctgtctatttcgttcatccatagttgcctgactccccgtcgtgtagataactacgatacgggagggcttaccatctggccccagtgctgcaatgataccgcgagacccacgctcaccggctccagatttatcagcaataaaccagccagccggaagggccgagcgcagaagtggtcctgcaactttatccgcctccatccagtctattaattgttgccgggaagctagagtaagtagttcgccagttaatagtttgcgcaacgttgttgccattgctacaggcatcgtggtgtcacgctcgtcgtttggtatggcttcattcagctccggttcccaacgatcaaggcgagttacatgatcccccatgttgtgcaaaaaagcggttagctccttcggtcctccgatcgttgtcagaagtaagttggccgcagtgttatcactcatggttatggcagcactgcataattctcttactgtcatgccatccgtaagatgcttttctgtgactggtgagtactcaaccaagtcattctgagaatagtgtatgcggcgaccgagttgctc

SEQ ID NO: 273 - DNA, 4804 bp, Artificial Sequence
  Synthetic
ttgcccggcgtcaatacgggataataccgcgccacatagcagaactttaaaagtgctcatcattggaaaacgttcttcggggcgaaaactctcaaggatcttaccgctgttgagatccagttcgatgtaacccactcgtgcacccaactgatcttcagcatcttttactttcaccagcgtttctgggtgagcaaaaacaggaaggcaaaatgccgcaaaaaagggaataagggcgacacggaaatgttgaatactcatactcttcctttttcattattattgaagcatttatcagggttattgtctcatgagcggatacatatttgaatgtatttagaaaaataaacaaataggggttccgcgcacatttccccgaaaagtgccacctgacgtcgacggatcgggagatctcccgatcccctatggtcgactctcagtacaatctgctctgatgccgcatagttaagccagtatctgctccctgcttgtgtgttggaggtcgctgagtagtgcgcgagcaaaatttaagctacaacaaggcaaggcttgaccgacaattgcatgaagaatctgcttagggttaggcgttttgcgctgcttcgcgatgtacgggccagatatacgcgagggcctatttcccatgattccttcatatttgcatatacgatacaaggctgttagagagataattagaattaatttgactgtaaacacaaagatattagtacaaaatacgtgacgtagaaagtaataatttcttgggtagtttgcagttttaaaattatgttttaaaatggactatcatatgcttaccgtaacttgaaagtatttcgatttcttggctttatatatcttgtggaaaggacgaaacaccgtaatacgactcactatagggtctagaattcctgtgacctgccgtataggcagctgaagataatgcaggcaaatcaaccttagtctgaaggcctaggcataattctgccgaaaaggcagtgagtagtgtagcggccgctttttttcttctgaggcggaaagaaccagctggggctctagggggtatccccacgcgccctgtagcggcgcattaagcgcggcgggtgtggtggttacgcgcagcgtgaccgctacacttgccagcgccctagcgcccgctcctttcgctttcttcccttcctttctcgccacgttcgccggctttccccgtcaagctctaaatcgggggctccctttagggttccgatttagtgctttacggcacctcgaccccaaaaaacttgattagggtgatggttcacgtagtgggccatcgccctgatagacggtttttcgccctttgacgttggagtccacgttctttaatagtggactcttgttccaaactggaacaacactcaaccctatctcggtctattcttttgatttataagggattttgccgatttcggcctattggttaaaaaatgagctgatttaacaaaaatttaacgcgaattaattctgtggaatgtgtgtcagttagggtgtggaaagtccccaggctccccagcaggcagaagtatgcaaagcatgcatctcaattagtcagcaaccaggtgtggaaagtccccaggctccccagcaggcagaagtatgcaaagcatgcatctcaattagtcagcaaccatagtcccgcccctaactccgcccatcccgcccctaactccgcccagttccgcccattctccgccccatggctgactaattttttttatttatgcagaggccgaggccgcctctgcctctgagctattccagaagtagtgaggaggcttttttggaggcctaggcttttgcaaaaagctcccgggagcttgtatatccattttcggatctgatcaagagacaggatgaggatcgtttcgcatgattgaacaagatggattgcacgcaggttctccggccgcttgggtggagaggctattcggctatgactgggcacaacagacaatcggctgctctgatgccgccgtgttccggctgtcagcgcaggggcgcccggttctttttgtcaagaccgacctgtccggtgccctgaatgaactgcaggacgaggcagcgcggctatcgtggctggccacgacgggcgttccttgcgcagctgtgctcgacgttgtcactgaagcgggaagggactggctgctattgggcgaagtgccggggcaggatctcctgtcatctcaccttgctcctgccgagaaagtatccatcatggctgatgcaatgcggcggctgcatacgcttgatccggctacctgcccattcgaccaccaagcgaaacatcgcatcgagcgagcacgtactcggatggaagccggtcttgtcgatcaggatgatctggacgaagagcatcaggggctcgcgccagccgaactgttcgccaggctcaaggcgcgcatgcccgacggcgaggatctcgtcgtgacccatggcgatgcctgcttgccgaatatcatggtggaaaatggccgcttttctggattcatcgactgtggccggctgggtgtggcggaccgctatcaggacatagcgttggctacccgtgatattgctgaagagcttggcggcgaatgggctgaccgcttcctcgtgctttacggtatcgccgctcccgattcgcagcgcatcgccttctatcgccttcttgacgagttcttctgagcgggactctggggttcgaaatgaccgaccaagcgacgcccaacctgccatcacgagatttcgattccaccgccgccttctatgaaaggttgggcttcggaatcgttttccgggacgccggctggatgatcctccagcgcggggatctcatgctggagttcttcgcccaccccaacttgtttattgcagcttataatggttacaaataaagcaatagcatcacaaatttcacaaataaagcatttttttcactgcattctagttgtggtttgtccaaactcatcaatgtatcttatcatgtctgtataccgtcgacctctagctagagcttggcgtaatcatggtcatagctgtttcctgtgtgaaattgttatccgctcacaattccacacaacatacgagccggaagcataaagtgtaaagcctggggtgcctaatgagtgagctaactcacattaattgcgttgcgctcactgcccgctttccagtcgggaaacctgtcgtgccagctgcattaatgaatcggccaacgcgcggggagaggcggtttgcgtattgggcgctcttccgcttcctcgctcactgactcgctgcgctcggtcgttcggctgcggcgagcggtatcagctcactcaaaggcggtaatacggttatccacagaatcaggggataacgcaggaaagaacatgtgagcaaaaggccagcaaaaggccaggaaccgtaaaaaggccgcgttgctggcgtttttccataggctccgcccccctgacgagcatcacaaaaatcgacgctcaagtcagaggtggcgaaacccgacaggactataaagataccaggcgtttccccctggaagctccctcgtgcgctctcctgttccgaccctgccgcttaccggatacctgtccgcctttctcccttcgggaagcgtggcgctttctcaatgctcacgctgtaggtatctcagttcggtgtaggtcgttcgctccaagctgggctgtgtgcacgaaccccccgttcagcccgaccgctgcgccttatccggtaactatcgtcttgagtccaacccggtaagacacgacttatcgccactggcagcagccactggtaacaggattagcagagcgaggtatgtaggcggtgctacagagttcttgaagtggtggcctaactacggctacactagaaggacagtatttggtatctgcgctctgctgaagccagttaccttcggaaaaagagttggtagctcttgatccggcaaacaaaccaccgctggtagcggtggtttttttgtttgcaagcagcagattacgcgcagaaaaaaaggatctcaagaagatcctttgatcttttctacggggtctgacgctcagtggaacgaaaactcacgttaagggattttggtcatgagattatcaaaaaggatcttcacctagatccttttaaattaaaaatgaagttttaaatcaatctaaagtatatatgagtaaacttggtctgacagttaccaatgcttaatcagtgaggcacctatctcagcgatctgtctatttcgttcatccatagttgcctgactccccgtcgtgtagataactacgatacgggagggcttaccatctggccccagtgctgcaatgataccgcgagacccacgctcaccggctccagatttatcagcaataaaccagccagccggaagggccgagcgcagaagtggtcctgcaactttatccgcctccatccagtctattaattgttgccgggaagctagagtaagtagttcgccagttaatagtttgcgcaacgttgttgccattgctacaggcatcgtggtgtcacgctcgtcgtttggtatggcttcattcagctccggttcccaacgatcaaggcgagttacatgatcccccatgttgtgcaaaaaagcggttagctccttcggtcctccgatcgttgtcagaagtaagttggccgcagtgttatcactcatggttatggcagcactgcataattctcttactgtcatgccatccgtaagatgcttttctgtgactggtgagtactcaaccaagtcattctgagaatagtgtatgcggcgaccgagttgctc

SEQ ID NO: 274 - DNA, 4800 bp, Artificial Sequence
  Synthetic
ttgcccggcgtcaatacgggataataccgcgccacatagcagaactttaaaagtgctcatcattggaaaacgttcttcggggcgaaaactctcaaggatcttaccgctgttgagatccagttcgatgtaacccactcgtgcacccaactgatcttcagcatcttttactttcaccagcgtttctgggtgagcaaaaacaggaaggcaaaatgccgcaaaaaagggaataagggcgacacggaaatgttgaatactcatactcttcctttttcattattattgaagcatttatcagggttattgtctcatgagcggatacatatttgaatgtatttagaaaaataaacaaataggggttccgcgcacatttccccgaaaagtgccacctgacgtcgacggatcgggagatctcccgatcccctatggtcgactctcagtacaatctgctctgatgccgcatagttaagccagtatctgctccctgcttgtgtgttggaggtcgctgagtagtgcgcgagcaaaatttaagctacaacaaggcaaggcttgaccgacaattgcatgaagaatctgcttagggttaggcgttttgcgctgcttcgcgatgtacgggccagatatacgcgagggcctatttcccatgattccttcatatttgcatatacgatacaaggctgttagagagataattagaattaatttgactgtaaacacaaagatattagtacaaaatacgtgacgtagaaagtaataatttcttgggtagtttgcagttttaaaattatgttttaaaatggactatcatatgcttaccgtaacttgaaagtatttcgatttcttggctttatatatcttgtggaaaggacgaaacaccgtaatacgactcactatagggtctagaattcctgtgacctgccgtataggcagctgaagataatgcaggcaaatcaaccttagtctgaaggcctataattctgccgaaaaggcagtgagtagtgtagcggccgctttttttcttctgaggcggaaagaaccagctggggctctagggggtatccccacgcgccctgtagcggcgcattaagcgcggcgggtgtggtggttacgcgcagcgtgaccgctacacttgccagcgccctagcgcccgctcctttcgctttcttcccttcctttctcgccacgttcgccggctttccccgtcaagctctaaatcgggggctccctttagggttccgatttagtgctttacggcacctcgaccccaaaaaacttgattagggtgatggttcacgtagtgggccatcgccctgatagacggtttttcgccctttgacgttggagtccacgttctttaatagtggactcttgttccaaactggaacaacactcaaccctatctcggtctattcttttgatttataagggattttgccgatttcggcctattggttaaaaaatgagctgatttaacaaaaatttaacgcgaattaattctgtggaatgtgtgtcagttagggtgtggaaagtccccaggctccccagcaggcagaagtatgcaaagcatgcatctcaattagtcagcaaccaggtgtggaaagtccccaggctccccagcaggcagaagtatgcaaagcatgcatctcaattagtcagcaaccatagtcccgcccctaactccgcccatcccgcccctaactccgcccagttccgcccattctccgccccatggctgactaattttttttatttatgcagaggccgaggccgcctctgcctctgagctattccagaagtagtgaggaggcttttttggaggcctaggcttttgcaaaaagctcccgggagcttgtatatccattttcggatctgatcaagagacaggatgaggatcgtttcgcatgattgaacaagatggattgcacgcaggttctccggccgcttgggtggagaggctattcggctatgactgggcacaacagacaatcggctgctctgatgccgccgtgttccggctgtcagcgcaggggcgcccggttctttttgtcaagaccgacctgtccggtgccctgaatgaactgcaggacgaggcagcgcggctatcgtggctggccacgacgggcgttccttgcgcagctgtgctcgacgttgtcactgaagcgggaagggactggctgctattgggcgaagtgccggggcaggatctcctgtcatctcaccttgctcctgccgagaaagtatccatcatggctgatgcaatgcggcggctgcatacgcttgatccggctacctgcccattcgaccaccaagcgaaacatcgcatcgagcgagcacgtactcggatggaagccggtcttgtcgatcaggatgatctggacgaagagcatcaggggctcgcgccagccgaactgttcgccaggctcaaggcgcgcatgcccgacggcgaggatctcgtcgtgacccatggcgatgcctgcttgccgaatatcatggtggaaaatggccgcttttctggattcatcgactgtggccggctgggtgtggcggaccgctatcaggacatagcgttggctacccgtgatattgctgaagagcttggcggcgaatgggctgaccgcttcctcgtgctttacggtatcgccgctcccgattcgcagcgcatcgccttctatcgccttcttgacgagttcttctgagcgggactctggggttcgaaatgaccgaccaagcgacgcccaacctgccatcacgagatttcgattccaccgccgccttctatgaaaggttgggcttcggaatcgttttccgggacgccggctggatgatcctccagcgcggggatctcatgctggagttcttcgcccaccccaacttgtttattgcagcttataatggttacaaataaagcaatagcatcacaaatttcacaaataaagcatttttttcactgcattctagttgtggtttgtccaaactcatcaatgtatcttatcatgtctgtataccgtcgacctctagctagagcttggcgtaatcatggtcatagctgtttcctgtgtgaaattgttatccgctcacaattccacacaacatacgagccggaagcataaagtgtaaagcctggggtgcctaatgagtgagctaactcacattaattgcgttgcgctcactgcccgctttccagtcgggaaacctgtcgtgccagctgcattaatgaatcggccaacgcgcggggagaggcggtttgcgtattgggcgctcttccgcttcctcgctcactgactcgctgcgctcggtcgttcggctgcggcgagcggtatcagctcactcaaaggcggtaatacggttatccacagaatcaggggataacgcaggaaagaacatgtgagcaaaaggccagcaaaaggccaggaaccgtaaaaaggccgcgttgctggcgtttttccataggctccgcccccctgacgagcatcacaaaaatcgacgctcaagtcagaggtggcgaaacccgacaggactataaagataccaggcgtttccccctggaagctccctcgtgcgctctcctgttccgaccctgccgcttaccggatacctgtccgcctttctcccttcgggaagcgtggcgctttctcaatgctcacgctgtaggtatctcagttcggtgtaggtcgttcgctccaagctgggctgtgtgcacgaaccccccgttcagcccgaccgctgcgccttatccggtaactatcgtcttgagtccaacccggtaagacacgacttatcgccactggcagcagccactggtaacaggattagcagagcgaggtatgtaggcggtgctacagagttcttgaagtggtggcctaactacggctacactagaaggacagtatttggtatctgcgctctgctgaagccagttaccttcggaaaaagagttggtagctcttgatccggcaaacaaaccaccgctggtagcggtggtttttttgtttgcaagcagcagattacgcgcagaaaaaaaggatctcaagaagatcctttgatcttttctacggggtctgacgctcagtggaacgaaaactcacgttaagggattttggtcatgagattatcaaaaaggatcttcacctagatccttttaaattaaaaatgaagttttaaatcaatctaaagtatatatgagtaaacttggtctgacagttaccaatgcttaatcagtgaggcacctatctcagcgatctgtctatttcgttcatccatagttgcctgactccccgtcgtgtagataactacgatacgggagggcttaccatctggccccagtgctgcaatgataccgcgagacccacgctcaccggctccagatttatcagcaataaaccagccagccggaagggccgagcgcagaagtggtcctgcaactttatccgcctccatccagtctattaattgttgccgggaagctagagtaagtagttcgccagttaatagtttgcgcaacgttgttgccattgctacaggcatcgtggtgtcacgctcgtcgtttggtatggcttcattcagctccggttcccaacgatcaaggcgagttacatgatcccccatgttgtgcaaaaaagcggttagctccttcggtcctccgatcgttgtcagaagtaagttggccgcagtgttatcactcatggttatggcagcactgcataattctcttactgtcatgccatccgtaagatgcttttctgtgactggtgagtactcaaccaagtcattctgagaatagtgtatgcggcgaccgagttgctc

SEQ ID NO: 275 - DNA, 4799 bp, Artificial Sequence
  Synthetic
ttgcccggcgtcaatacgggataataccgcgccacatagcagaactttaaaagtgctcatcattggaaaacgttcttcggggcgaaaactctcaaggatcttaccgctgttgagatccagttcgatgtaacccactcgtgcacccaactgatcttcagcatcttttactttcaccagcgtttctgggtgagcaaaaacaggaaggcaaaatgccgcaaaaaagggaataagggcgacacggaaatgttgaatactcatactcttcctttttcattattattgaagcatttatcagggttattgtctcatgagcggatacatatttgaatgtatttagaaaaataaacaaataggggttccgcgcacatttccccgaaaagtgccacctgacgtcgacggatcgggagatctcccgatcccctatggtcgactctcagtacaatctgctctgatgccgcatagttaagccagtatctgctccctgcttgtgtgttggaggtcgctgagtagtgcgcgagcaaaatttaagctacaacaaggcaaggcttgaccgacaattgcatgaagaatctgcttagggttaggcgttttgcgctgcttcgcgatgtacgggccagatatacgcgagggcctatttcccatgattccttcatatttgcatatacgatacaaggctgttagagagataattagaattaatttgactgtaaacacaaagatattagtacaaaatacgtgacgtagaaagtaataatttcttgggtagtttgcagttttaaaattatgttttaaaatggactatcatatgcttaccgtaacttgaaagtatttcgatttcttggctttatatatcttgtggaaaggacgaaacaccgtaatacgactcactatagggtctagaattcctgtgacctgccgtataggcagctgaagataatgcaggcaaatcaaccttagtctgaaggccttaattctgccgaaaaggcagtgagtagtgtagcggccgctttttttcttctgaggcggaaagaaccagctggggctctagggggtatccccacgcgccctgtagcggcgcattaagcgcggcgggtgtggtggttacgcgcagcgtgaccgctacacttgccagcgccctagcgcccgctcctttcgctttcttcccttcctttctcgccacgttcgccggctttccccgtcaagctctaaatcgggggctccctttagggttccgatttagtgctttacggcacctcgaccccaaaaaacttgattagggtgatggttcacgtagtgggccatcgccctgatagacggtttttcgccctttgacgttggagtccacgttctttaatagtggactcttgttccaaactggaacaacactcaaccctatctcggtctattcttttgatttataagggattttgccgatttcggcctattggttaaaaaatgagctgatttaacaaaaatttaacgcgaattaattctgtggaatgtgtgtcagttagggtgtggaaagtccccaggctccccagcaggcagaagtatgcaaagcatgcatctcaattagtcagcaaccaggtgtggaaagtccccaggctccccagcaggcagaagtatgcaaagcatgcatctcaattagtcagcaaccatagtcccgcccctaactccgcccatcccgcccctaactccgcccagttccgcccattctccgccccatggctgactaattttttttatttatgcagaggccgaggccgcctctgcctctgagctattccagaagtagtgaggaggcttttttggaggcctaggcttttgcaaaaagctcccgggagcttgtatatccattttcggatctgatcaagagacaggatgaggatcgtttcgcatgattgaacaagatggattgcacgcaggttctccggccgcttgggtggagaggctattcggctatgactgggcacaacagacaatcggctgctctgatgccgccgtgttccggctgtcagcgcaggggcgcccggttctttttgtcaagaccgacctgtccggtgccctgaatgaactgcaggacgaggcagcgcggctatcgtggctggccacgacgggcgttccttgcgcagctgtgctcgacgttgtcactgaagcgggaagggactggctgctattgggcgaagtgccggggcaggatctcctgtcatctcaccttgctcctgccgagaaagtatccatcatggctgatgcaatgcggcggctgcatacgcttgatccggctacctgcccattcgaccaccaagcgaaacatcgcatcgagcgagcacgtactcggatggaagccggtcttgtcgatcaggatgatctggacgaagagcatcaggggctcgcgccagccgaactgttcgccaggctcaaggcgcgcatgcccgacggcgaggatctcgtcgtgacccatggcgatgcctgcttgccgaatatcatggtggaaaatggccgcttttctggattcatcgactgtggccggctgggtgtggcggaccgctatcaggacatagcgttggctacccgtgatattgctgaagagcttggcggcgaatgggctgaccgcttcctcgtgctttacggtatcgccgctcccgattcgcagcgcatcgccttctatcgccttcttgacgagttcttctgagcgggactctggggttcgaaatgaccgaccaagcgacgcccaacctgccatcacgagatttcgattccaccgccgccttctatgaaaggttgggcttcggaatcgttttccgggacgccggctggatgatcctccagcgcggggatctcatgctggagttcttcgcccaccccaacttgtttattgcagcttataatggttacaaataaagcaatagcatcacaaatttcacaaataaagcatttttttcactgcattctagttgtggtttgtccaaactcatcaatgtatcttatcatgtctgtataccgtcgacctctagctagagcttggcgtaatcatggtcatagctgtttcctgtgtgaaattgttatccgctcacaattccacacaacatacgagccggaagcataaagtgtaaagcctggggtgcctaatgagtgagctaactcacattaattgcgttgcgctcactgcccgctttccagtcgggaaacctgtcgtgccagctgcattaatgaatcggccaacgcgcggggagaggcggtttgcgtattgggcgctcttccgcttcctcgctcactgactcgctgcgctcggtcgttcggctgcggcgagcggtatcagctcactcaaaggcggtaatacggttatccacagaatcaggggataacgcaggaaagaacatgtgagcaaaaggccagcaaaaggccaggaaccgtaaaaaggccgcgttgctggcgtttttccataggctccgcccccctgacgagcatcacaaaaatcgacgctcaagtcagaggtggcgaaacccgacaggactataaagataccaggcgtttccccctggaagctccctcgtgcgctctcctgttccgaccctgccgcttaccggatacctgtccgcctttctcccttcgggaagcgtggcgctttctcaatgctcacgctgtaggtatctcagttcggtgtaggtcgttcgctccaagctgggctgtgtgcacgaaccccccgttcagcccgaccgctgcgccttatccggtaactatcgtcttgagtccaacccggtaagacacgacttatcgccactggcagcagccactggtaacaggattagcagagcgaggtatgtaggcggtgctacagagttcttgaagtggtggcctaactacggctacactagaaggacagtatttggtatctgcgctctgctgaagccagttaccttcggaaaaagagttggtagctcttgatccggcaaacaaaccaccgctggtagcggtggtttttttgtttgcaagcagcagattacgcgcagaaaaaaaggatctcaagaagatcctttgatcttttctacggggtctgacgctcagtggaacgaaaactcacgttaagggattttggtcatgagattatcaaaaaggatcttcacctagatccttttaaattaaaaatgaagttttaaatcaatctaaagtatatatgagtaaacttggtctgacagttaccaatgcttaatcagtgaggcacctatctcagcgatctgtctatttcgttcatccatagttgcctgactccccgtcgtgtagataactacgatacgggagggcttaccatctggccccagtgctgcaatgataccgcgagacccacgctcaccggctccagatttatcagcaataaaccagccagccggaagggccgagcgcagaagtggtcctgcaactttatccgcctccatccagtctattaattgttgccgggaagctagagtaagtagttcgccagttaatagtttgcgcaacgttgttgccattgctacaggcatcgtggtgtcacgctcgtcgtttggtatggcttcattcagctccggttcccaacgatcaaggcgagttacatgatcccccatgttgtgcaaaaaagcggttagctccttcggtcctccgatcgttgtcagaagtaagttggccgcagtgttatcactcatggttatggcagcactgcataattctcttactgtcatgccatccgtaagatgcttttctgtgactggtgagtactcaaccaagtcattctgagaatagtgtatgcggcgaccgagttgctc

SEQ ID NO: 276 - DNA, 4797 bp, Artificial Sequence
  Synthetic
ttgcccggcgtcaatacgggataataccgcgccacatagcagaactttaaaagtgctcatcattggaaaacgttcttcggggcgaaaactctcaaggatcttaccgctgttgagatccagttcgatgtaacccactcgtgcacccaactgatcttcagcatcttttactttcaccagcgtttctgggtgagcaaaaacaggaaggcaaaatgccgcaaaaaagggaataagggcgacacggaaatgttgaatactcatactcttcctttttcattattattgaagcatttatcagggttattgtctcatgagcggatacatatttgaatgtatttagaaaaataaacaaataggggttccgcgcacatttccccgaaaagtgccacctgacgtcgacggatcgggagatctcccgatcccctatggtcgactctcagtacaatctgctctgatgccgcatagttaagccagtatctgctccctgcttgtgtgttggaggtcgctgagtagtgcgcgagcaaaatttaagctacaacaaggcaaggcttgaccgacaattgcatgaagaatctgcttagggttaggcgttttgcgctgcttcgcgatgtacgggccagatatacgcgagggcctatttcccatgattccttcatatttgcatatacgatacaaggctgttagagagataattagaattaatttgactgtaaacacaaagatattagtacaaaatacgtgacgtagaaagtaataatttcttgggtagtttgcagttttaaaattatgttttaaaatggactatcatatgcttaccgtaacttgaaagtatttcgatttcttggctttatatatcttgtggaaaggacgaaacaccgtaatacgactcactatagggtctagaattcctgtgacctgccgtataggcagctgaagataatgcaggcaaatcaaccttagtctgaaggctaattctgccgaaaaggcagtgagtagtgtagcggccgctttttttcttctgaggcggaaagaaccagctggggctctagggggtatccccacgcgccctgtagcggcgcattaagcgcggcgggtgtggtggttacgcgcagcgtgaccgctacacttgccagcgccctagcgcccgctcctttcgctttcttcccttcctttctcgccacgttcgccggctttccccgtcaagctctaaatcgggggctccctttagggttccgatttagtgctttacggcacctcgaccccaaaaaacttgattagggtgatggttcacgtagtgggccatcgccctgatagacggtttttcgccctttgacgttggagtccacgttctttaatagtggactcttgttccaaactggaacaacactcaaccctatctcggtctattcttttgatttataagggattttgccgatttcggcctattggttaaaaaatgagctgatttaacaaaaatttaacgcgaattaattctgtggaatgtgtgtcagttagggtgtggaaagtccccaggctccccagcaggcagaagtatgcaaagcatgcatctcaattagtcagcaaccaggtgtggaaagtccccaggctccccagcaggcagaagtatgcaaagcatgcatctcaattagtcagcaaccatagtcccgcccctaactccgcccatcccgcccctaactccgcccagttccgcccattctccgccccatggctgactaattttttttatttatgcagaggccgaggccgcctctgcctctgagctattccagaagtagtgaggaggcttttttggaggcctaggcttttgcaaaaagctcccgggagcttgtatatccattttcggatctgatcaagagacaggatgaggatcgtttcgcatgattgaacaagatggattgcacgcaggttctccggccgcttgggtggagaggctattcggctatgactgggcacaacagacaatcggctgctctgatgccgccgtgttccggctgtcagcgcaggggcgcccggttctttttgtcaagaccgacctgtccggtgccctgaatgaactgcaggacgaggcagcgcggctatcgtggctggccacgacgggcgttccttgcgcagctgtgctcgacgttgtcactgaagcgggaagggactggctgctattgggcgaagtgccggggcaggatctcctgtcatctcaccttgctcctgccgagaaagtatccatcatggctgatgcaatgcggcggctgcatacgcttgatccggctacctgcccattcgaccaccaagcgaaacatcgcatcgagcgagcacgtactcggatggaagccggtcttgtcgatcaggatgatctggacgaagagcatcaggggctcgcgccagccgaactgttcgccaggctcaaggcgcgcatgcccgacggcgaggatctcgtcgtgacccatggcgatgcctgcttgccgaatatcatggtggaaaatggccgcttttctggattcatcgactgtggccggctgggtgtggcggaccgctatcaggacatagcgttggctacccgtgatattgctgaagagcttggcggcgaatgggctgaccgcttcctcgtgctttacggtatcgccgctcccgattcgcagcgcatcgccttctatcgccttcttgacgagttcttctgagcgggactctggggttcgaaatgaccgaccaagcgacgcccaacctgccatcacgagatttcgattccaccgccgccttctatgaaaggttgggcttcggaatcgttttccgggacgccggctggatgatcctccagcgcggggatctcatgctggagttcttcgcccaccccaacttgtttattgcagcttataatggttacaaataaagcaatagcatcacaaatttcacaaataaagcatttttttcactgcattctagttgtggtttgtccaaactcatcaatgtatcttatcatgtctgtataccgtcgacctctagctagagcttggcgtaatcatggtcatagctgtttcctgtgtgaaattgttatccgctcacaattccacacaacatacgagccggaagcataaagtgtaaagcctggggtgcctaatgagtgagctaactcacattaattgcgttgcgctcactgcccgctttccagtcgggaaacctgtcgtgccagctgcattaatgaatcggccaacgcgcggggagaggcggtttgcgtattgggcgctcttccgcttcctcgctcactgactcgctgcgctcggtcgttcggctgcggcgagcggtatcagctcactcaaaggcggtaatacggttatccacagaatcaggggataacgcaggaaagaacatgtgagcaaaaggccagcaaaaggccaggaaccgtaaaaaggccgcgttgctggcgtttttccataggctccgcccccctgacgagcatcacaaaaatcgacgctcaagtcagaggtggcgaaacccgacaggactataaagataccaggcgtttccccctggaagctccctcgtgcgctctcctgttccgaccctgccgcttaccggatacctgtccgcctttctcccttcgggaagcgtggcgctttctcaatgctcacgctgtaggtatctcagttcggtgtaggtcgttcgctccaagctgggctgtgtgcacgaaccccccgttcagcccgaccgctgcgccttatccggtaactatcgtcttgagtccaacccggtaagacacgacttatcgccactggcagcagccactggtaacaggattagcagagcgaggtatgtaggcggtgctacagagttcttgaagtggtggcctaactacggctacactagaaggacagtatttggtatctgcgctctgctgaagccagttaccttcggaaaaagagttggtagctcttgatccggcaaacaaaccaccgctggtagcggtggtttttttgtttgcaagcagcagattacgcgcagaaaaaaaggatctcaagaagatcctttgatcttttctacggggtctgacgctcagtggaacgaaaactcacgttaagggattttggtcatgagattatcaaaaaggatcttcacctagatccttttaaattaaaaatgaagttttaaatcaatctaaagtatatatgagtaaacttggtctgacagttaccaatgcttaatcagtgaggcacctatctcagcgatctgtctatttcgttcatccatagttgcctgactccccgtcgtgtagataactacgatacgggagggcttaccatctggccccagtgctgcaatgataccgcgagacccacgctcaccggctccagatttatcagcaataaaccagccagccggaagggccgagcgcagaagtggtcctgcaactttatccgcctccatccagtctattaattgttgccgggaagctagagtaagtagttcgccagttaatagtttgcgcaacgttgttgccattgctacaggcatcgtggtgtcacgctcgtcgtttggtatggcttcattcagctccggttcccaacgatcaaggcgagttacatgatcccccatgttgtgcaaaaaagcggttagctccttcggtcctccgatcgttgtcagaagtaagttggccgcagtgttatcactcatggttatggcagcactgcataattctcttactgtcatgccatccgtaagatgcttttctgtgactggtgagtactcaaccaagtcattctgagaatagtgtatgcggcgaccgagttgctc

SEQ ID NO: 277 - DNA, 4796 bp, Artificial Sequence
  Synthetic
ttgcccggcgtcaatacgggataataccgcgccacatagcagaactttaaaagtgctcatcattggaaaacgttcttcggggcgaaaactctcaaggatcttaccgctgttgagatccagttcgatgtaacccactcgtgcacccaactgatcttcagcatcttttactttcaccagcgtttctgggtgagcaaaaacaggaaggcaaaatgccgcaaaaaagggaataagggcgacacggaaatgttgaatactcatactcttcctttttcattattattgaagcatttatcagggttattgtctcatgagcggatacatatttgaatgtatttagaaaaataaacaaataggggttccgcgcacatttccccgaaaagtgccacctgacgtcgacggatcgggagatctcccgatcccctatggtcgactctcagtacaatctgctctgatgccgcatagttaagccagtatctgctccctgcttgtgtgttggaggtcgctgagtagtgcgcgagcaaaatttaagctacaacaaggcaaggcttgaccgacaattgcatgaagaatctgcttagggttaggcgttttgcgctgcttcgcgatgtacgggccagatatacgcgagggcctatttcccatgattccttcatatttgcatatacgatacaaggctgttagagagataattagaattaatttgactgtaaacacaaagatattagtacaaaatacgtgacgtagaaagtaataatttcttgggtagtttgcagttttaaaattatgttttaaaatggactatcatatgcttaccgtaacttgaaagtatttcgatttcttggctttatatatcttgtggaaaggacgaaacaccgtaatacgactcactatagggtctagaattcctgtgacctgccgtataggcagctgaagataatgcaggcaaatcaaccttagtctgaaggtaattctgccgaaaaggcagtgagtagtgtagcggccgctttttttcttctgaggcggaaagaaccagctggggctctagggggtatccccacgcgccctgtagcggcgcattaagcgcggcgggtgtggtggttacgcgcagcgtgaccgctacacttgccagcgccctagcgcccgctcctttcgctttcttcccttcctttctcgccacgttcgccggctttccccgtcaagctctaaatcgggggctccctttagggttccgatttagtgctttacggcacctcgaccccaaaaaacttgattagggtgatggttcacgtagtgggccatcgccctgatagacggtttttcgccctttgacgttggagtccacgttctttaatagtggactcttgttccaaactggaacaacactcaaccctatctcggtctattcttttgatttataagggattttgccgatttcggcctattggttaaaaaatgagctgatttaacaaaaatttaacgcgaattaattctgtggaatgtgtgtcagttagggtgtggaaagtccccaggctccccagcaggcagaagtatgcaaagcatgcatctcaattagtcagcaaccaggtgtggaaagtccccaggctccccagcaggcagaagtatgcaaagcatgcatctcaattagtcagcaaccatagtcccgcccctaactccgcccatcccgcccctaactccgcccagttccgcccattctccgccccatggctgactaattttttttatttatgcagaggccgaggccgcctctgcctctgagctattccagaagtagtgaggaggcttttttggaggcctaggcttttgcaaaaagctcccgggagcttgtatatccattttcggatctgatcaagagacaggatgaggatcgtttcgcatgattgaacaagatggattgcacgcaggttctccggccgcttgggtggagaggctattcggctatgactgggcacaacagacaatcggctgctctgatgccgccgtgttccggctgtcagcgcaggggcgcccggttctttttgtcaagaccgacctgtccggtgccctgaatgaactgcaggacgaggcagcgcggctatcgtggctggccacgacgggcgttccttgcgcagctgtgctcgacgttgtcactgaagcgggaagggactggctgctattgggcgaagtgccggggcaggatctcctgtcatctcaccttgctcctgccgagaaagtatccatcatggctgatgcaatgcggcggctgcatacgcttgatccggctacctgcccattcgaccaccaagcgaaacatcgcatcgagcgagcacgtactcggatggaagccggtcttgtcgatcaggatgatctggacgaagagcatcaggggctcgcgccagccgaactgttcgccaggctcaaggcgcgcatgcccgacggcgaggatctcgtcgtgacccatggcgatgcctgcttgccgaatatcatggtggaaaatggccgcttttctggattcatcgactgtggccggctgggtgtggcggaccgctatcaggacatagcgttggctacccgtgatattgctgaagagcttggcggcgaatgggctgaccgcttcctcgtgctttacggtatcgccgctcccgattcgcagcgcatcgccttctatcgccttcttgacgagttcttctgagcgggactctggggttcgaaatgaccgaccaagcgacgcccaacctgccatcacgagatttcgattccaccgccgccttctatgaaaggttgggcttcggaatcgttttccgggacgccggctggatgatcctccagcgcggggatctcatgctggagttcttcgcccaccccaacttgtttattgcagcttataatggttacaaataaagcaatagcatcacaaatttcacaaataaagcatttttttcactgcattctagttgtggtttgtccaaactcatcaatgtatcttatcatgtctgtataccgtcgacctctagctagagcttggcgtaatcatggtcatagctgtttcctgtgtgaaattgttatccgctcacaattccacacaacatacgagccggaagcataaagtgtaaagcctggggtgcctaatgagtgagctaactcacattaattgcgttgcgctcactgcccgctttccagtcgggaaacctgtcgtgccagctgcattaatgaatcggccaacgcgcggggagaggcggtttgcgtattgggcgctcttccgcttcctcgctcactgactcgctgcgctcggtcgttcggctgcggcgagcggtatcagctcactcaaaggcggtaatacggttatccacagaatcaggggataacgcaggaaagaacatgtgagcaaaaggccagcaaaaggccaggaaccgtaaaaaggccgcgttgctggcgtttttccataggctccgcccccctgacgagcatcacaaaaatcgacgctcaagtcagaggtggcgaaacccgacaggactataaagataccaggcgtttccccctggaagctccctcgtgcgctctcctgttccgaccctgccgcttaccggatacctgtccgcctttctcccttcgggaagcgtggcgctttctcaatgctcacgctgtaggtatctcagttcggtgtaggtcgttcgctccaagctgggctgtgtgcacgaaccccccgttcagcccgaccgctgcgccttatccggtaactatcgtcttgagtccaacccggtaagacacgacttatcgccactggcagcagccactggtaacaggattagcagagcgaggtatgtaggcggtgctacagagttcttgaagtggtggcctaactacggctacactagaaggacagtatttggtatctgcgctctgctgaagccagttaccttcggaaaaagagttggtagctcttgatccggcaaacaaaccaccgctggtagcggtggtttttttgtttgcaagcagcagattacgcgcagaaaaaaaggatctcaagaagatcctttgatcttttctacggggtctgacgctcagtggaacgaaaactcacgttaagggattttggtcatgagattatcaaaaaggatcttcacctagatccttttaaattaaaaatgaagttttaaatcaatctaaagtatatatgagtaaacttggtctgacagttaccaatgcttaatcagtgaggcacctatctcagcgatctgtctatttcgttcatccatagttgcctgactccccgtcgtgtagataactacgatacgggagggcttaccatctggccccagtgctgcaatgataccgcgagacccacgctcaccggctccagatttatcagcaataaaccagccagccggaagggccgagcgcagaagtggtcctgcaactttatccgcctccatccagtctattaattgttgccgggaagctagagtaagtagttcgccagttaatagtttgcgcaacgttgttgccattgctacaggcatcgtggtgtcacgctcgtcgtttggtatggcttcattcagctccggttcccaacgatcaaggcgagttacatgatcccccatgttgtgcaaaaaagcggttagctccttcggtcctccgatcgttgtcagaagtaagttggccgcagtgttatcactcatggttatggcagcactgcataattctcttactgtcatgccatccgtaagatgcttttctgtgactggtgagtactcaaccaagtcattctgagaatagtgtatgcggcgaccgagttgctc

SEQ ID NO: 278 - DNA, 4792 bp, Artificial Sequence
  Synthetic
ttgcccggcgtcaatacgggataataccgcgccacatagcagaactttaaaagtgctcatcattggaaaacgttcttcggggcgaaaactctcaaggatcttaccgctgttgagatccagttcgatgtaacccactcgtgcacccaactgatcttcagcatcttttactttcaccagcgtttctgggtgagcaaaaacaggaaggcaaaatgccgcaaaaaagggaataagggcgacacggaaatgttgaatactcatactcttcctttttcattattattgaagcatttatcagggttattgtctcatgagcggatacatatttgaatgtatttagaaaaataaacaaataggggttccgcgcacatttccccgaaaagtgccacctgacgtcgacggatcgggagatctcccgatcccctatggtcgactctcagtacaatctgctctgatgccgcatagttaagccagtatctgctccctgcttgtgtgttggaggtcgctgagtagtgcgcgagcaaaatttaagctacaacaaggcaaggcttgaccgacaattgcatgaagaatctgcttagggttaggcgttttgcgctgcttcgcgatgtacgggccagatatacgcgagggcctatttcccatgattccttcatatttgcatatacgatacaaggctgttagagagataattagaattaatttgactgtaaacacaaagatattagtacaaaatacgtgacgtagaaagtaataatttcttgggtagtttgcagttttaaaattatgttttaaaatggactatcatatgcttaccgtaacttgaaagtatttcgatttcttggctttatatatcttgtggaaaggacgaaacaccgtaatacgactcactatagggtctagaattcctgtgacctgccgtataggcagctgaagataatgcaggcaaatcaaccttagtctgtaattctgccgaaaaggcagtgagtagtgtagcggccgctttttttcttctgaggcggaaagaaccagctggggctctagggggtatccccacgcgccctgtagcggcgcattaagcgcggcgggtgtggtggttacgcgcagcgtgaccgctacacttgccagcgccctagcgcccgctcctttcgctttcttcccttcctttctcgccacgttcgccggctttccccgtcaagctctaaatcgggggctccctttagggttccgatttagtgctttacggcacctcgaccccaaaaaacttgattagggtgatggttcacgtagtgggccatcgccctgatagacggtttttcgccctttgacgttggagtccacgttctttaatagtggactcttgttccaaactggaacaacactcaaccctatctcggtctattcttttgatttataagggattttgccgatttcggcctattggttaaaaaatgagctgatttaacaaaaatttaacgcgaattaattctgtggaatgtgtgtcagttagggtgtggaaagtccccaggctccccagcaggcagaagtatgcaaagcatgcatctcaattagtcagcaaccaggtgtggaaagtccccaggctccccagcaggcagaagtatgcaaagcatgcatctcaattagtcagcaaccatagtcccgcccctaactccgcccatcccgcccctaactccgcccagttccgcccattctccgccccatggctgactaattttttttatttatgcagaggccgaggccgcctctgcctctgagctattccagaagtagtgaggaggcttttttggaggcctaggcttttgcaaaaagctcccgggagcttgtatatccattttcggatctgatcaagagacaggatgaggatcgtttcgcatgattgaacaagatggattgcacgcaggttctccggccgcttgggtggagaggctattcggctatgactgggcacaacagacaatcggctgctctgatgccgccgtgttccggctgtcagcgcaggggcgcccggttctttttgtcaagaccgacctgtccggtgccctgaatgaactgcaggacgaggcagcgcggctatcgtggctggccacgacgggcgttccttgcgcagctgtgctcgacgttgtcactgaagcgggaagggactggctgctattgggcgaagtgccggggcaggatctcctgtcatctcaccttgctcctgccgagaaagtatccatcatggctgatgcaatgcggcggctgcatacgcttgatccggctacctgcccattcgaccaccaagcgaaacatcgcatcgagcgagcacgtactcggatggaagccggtcttgtcgatcaggatgatctggacgaagagcatcaggggctcgcgccagccgaactgttcgccaggctcaaggcgcgcatgcccgacggcgaggatctcgtcgtgacccatggcgatgcctgcttgccgaatatcatggtggaaaatggccgcttttctggattcatcgactgtggccggctgggtgtggcggaccgctatcaggacatagcgttggctacccgtgatattgctgaagagcttggcggcgaatgggctgaccgcttcctcgtgctttacggtatcgccgctcccgattcgcagcgcatcgccttctatcgccttcttgacgagttcttctgagcgggactctggggttcgaaatgaccgaccaagcgacgcccaacctgccatcacgagatttcgattccaccgccgccttctatgaaaggttgggcttcggaatcgttttccgggacgccggctggatgatcctccagcgcggggatctcatgctggagttcttcgcccaccccaacttgtttattgcagcttataatggttacaaataaagcaatagcatcacaaatttcacaaataaagcatttttttcactgcattctagttgtggtttgtccaaactcatcaatgtatcttatcatgtctgtataccgtcgacctctagctagagcttggcgtaatcatggtcatagctgtttcctgtgtgaaattgttatccgctcacaattccacacaacatacgagccggaagcataaagtgtaaagcctggggtgcctaatgagtgagctaactcacattaattgcgttgcgctcactgcccgctttccagtcgggaaacctgtcgtgccagctgcattaatgaatcggccaacgcgcggggagaggcggtttgcgtattgggcgctcttccgcttcctcgctcactgactcgctgcgctcggtcgttcggctgcggcgagcggtatcagctcactcaaaggcggtaatacggttatccacagaatcaggggataacgcaggaaagaacatgtgagcaaaaggccagcaaaaggccaggaaccgtaaaaaggccgcgttgctggcgtttttccataggctccgcccccctgacgagcatcacaaaaatcgacgctcaagtcagaggtggcgaaacccgacaggactataaagataccaggcgtttccccctggaagctccctcgtgcgctctcctgttccgaccctgccgcttaccggatacctgtccgcctttctcccttcgggaagcgtggcgctttctcaatgctcacgctgtaggtatctcagttcggtgtaggtcgttcgctccaagctgggctgtgtgcacgaaccccccgttcagcccgaccgctgcgccttatccggtaactatcgtcttgagtccaacccggtaagacacgacttatcgccactggcagcagccactggtaacaggattagcagagcgaggtatgtaggcggtgctacagagttcttgaagtggtggcctaactacggctacactagaaggacagtatttggtatctgcgctctgctgaagccagttaccttcggaaaaagagttggtagctcttgatccggcaaacaaaccaccgctggtagcggtggtttttttgtttgcaagcagcagattacgcgcagaaaaaaaggatctcaagaagatcctttgatcttttctacggggtctgacgctcagtggaacgaaaactcacgttaagggattttggtcatgagattatcaaaaaggatcttcacctagatccttttaaattaaaaatgaagttttaaatcaatctaaagtatatatgagtaaacttggtctgacagttaccaatgcttaatcagtgaggcacctatctcagcgatctgtctatttcgttcatccatagttgcctgactccccgtcgtgtagataactacgatacgggagggcttaccatctggccccagtgctgcaatgataccgcgagacccacgctcaccggctccagatttatcagcaataaaccagccagccggaagggccgagcgcagaagtggtcctgcaactttatccgcctccatccagtctattaattgttgccgggaagctagagtaagtagttcgccagttaatagtttgcgcaacgttgttgccattgctacaggcatcgtggtgtcacgctcgtcgtttggtatggcttcattcagctccggttcccaacgatcaaggcgagttacatgatcccccatgttgtgcaaaaaagcggttagctccttcggtcctccgatcgttgtcagaagtaagttggccgcagtgttatcactcatggttatggcagcactgcataattctcttactgtcatgccatccgtaagatgcttttctgtgactggtgagtactcaaccaagtcattctgagaatagtgtatgcggcgaccgagttgctc

SEQ ID NO: 279 - DNA, 4786 bp, Artificial Sequence
  Synthetic
ttgcccggcgtcaatacgggataataccgcgccacatagcagaactttaaaagtgctcatcattggaaaacgttcttcggggcgaaaactctcaaggatcttaccgctgttgagatccagttcgatgtaacccactcgtgcacccaactgatcttcagcatcttttactttcaccagcgtttctgggtgagcaaaaacaggaaggcaaaatgccgcaaaaaagggaataagggcgacacggaaatgttgaatactcatactcttcctttttcattattattgaagcatttatcagggttattgtctcatgagcggatacatatttgaatgtatttagaaaaataaacaaataggggttccgcgcacatttccccgaaaagtgccacctgacgtcgacggatcgggagatctcccgatcccctatggtcgactctcagtacaatctgctctgatgccgcatagttaagccagtatctgctccctgcttgtgtgttggaggtcgctgagtagtgcgcgagcaaaatttaagctacaacaaggcaaggcttgaccgacaattgcatgaagaatctgcttagggttaggcgttttgcgctgcttcgcgatgtacgggccagatatacgcgagggcctatttcccatgattccttcatatttgcatatacgatacaaggctgttagagagataattagaattaatttgactgtaaacacaaagatattagtacaaaatacgtgacgtagaaagtaataatttcttgggtagtttgcagttttaaaattatgttttaaaatggactatcatatgcttaccgtaacttgaaagtatttcgatttcttggctttatatatcttgtggaaaggacgaaacaccgtaatacgactcactatagggtctagaattcctgtgacctgccgtataggcagctgaagataatgcaggcaaatcaacctttaattctgccgaaaaggcagtgagtagtgtagcggccgctttttttcttctgaggcggaaagaaccagctggggctctagggggtatccccacgcgccctgtagcggcgcattaagcgcggcgggtgtggtggttacgcgcagcgtgaccgctacacttgccagcgccctagcgcccgctcctttcgctttcttcccttcctttctcgccacgttcgccggctttccccgtcaagctctaaatcgggggctccctttagggttccgatttagtgctttacggcacctcgaccccaaaaaacttgattagggtgatggttcacgtagtgggccatcgccctgatagacggtttttcgccctttgacgttggagtccacgttctttaatagtggactcttgttccaaactggaacaacactcaaccctatctcggtctattcttttgatttataagggattttgccgatttcggcctattggttaaaaaatgagctgatttaacaaaaatttaacgcgaattaattctgtggaatgtgtgtcagttagggtgtggaaagtccccaggctccccagcaggcagaagtatgcaaagcatgcatctcaattagtcagcaaccaggtgtggaaagtccccaggctccccagcaggcagaagtatgcaaagcatgcatctcaattagtcagcaaccatagtcccgcccctaactccgcccatcccgcccctaactccgcccagttccgcccattctccgccccatggctgactaattttttttatttatgcagaggccgaggccgcctctgcctctgagctattccagaagtagtgaggaggcttttttggaggcctaggcttttgcaaaaagctcccgggagcttgtatatccattttcggatctgatcaagagacaggatgaggatcgtttcgcatgattgaacaagatggattgcacgcaggttctccggccgcttgggtggagaggctattcggctatgactgggcacaacagacaatcggctgctctgatgccgccgtgttccggctgtcagcgcaggggcgcccggttctttttgtcaagaccgacctgtccggtgccctgaatgaactgcaggacgaggcagcgcggctatcgtggctggccacgacgggcgttccttgcgcagctgtgctcgacgttgtcactgaagcgggaagggactggctgctattgggcgaagtgccggggcaggatctcctgtcatctcaccttgctcctgccgagaaagtatccatcatggctgatgcaatgcggcggctgcatacgcttgatccggctacctgcccattcgaccaccaagcgaaacatcgcatcgagcgagcacgtactcggatggaagccggtcttgtcgatcaggatgatctggacgaagagcatcaggggctcgcgccagccgaactgttcgccaggctcaaggcgcgcatgcccgacggcgaggatctcgtcgtgacccatggcgatgcctgcttgccgaatatcatggtggaaaatggccgcttttctggattcatcgactgtggccggctgggtgtggcggaccgctatcaggacatagcgttggctacccgtgatattgctgaagagcttggcggcgaatgggctgaccgcttcctcgtgctttacggtatcgccgctcccgattcgcagcgcatcgccttctatcgccttcttgacgagttcttctgagcgggactctggggttcgaaatgaccgaccaagcgacgcccaacctgccatcacgagatttcgattccaccgccgccttctatgaaaggttgggcttcggaatcgttttccgggacgccggctggatgatcctccagcgcggggatctcatgctggagttcttcgcccaccccaacttgtttattgcagcttataatggttacaaataaagcaatagcatcacaaatttcacaaataaagcatttttttcactgcattctagttgtggtttgtccaaactcatcaatgtatcttatcatgtctgtataccgtcgacctctagctagagcttggcgtaatcatggtcatagctgtttcctgtgtgaaattgttatccgctcacaattccacacaacatacgagccggaagcataaagtgtaaagcctggggtgcctaatgagtgagctaactcacattaattgcgttgcgctcactgcccgctttccagtcgggaaacctgtcgtgccagctgcattaatgaatcggccaacgcgcggggagaggcggtttgcgtattgggcgctcttccgcttcctcgctcactgactcgctgcgctcggtcgttcggctgcggcgagcggtatcagctcactcaaaggcggtaatacggttatccacagaatcaggggataacgcaggaaagaacatgtgagcaaaaggccagcaaaaggccaggaaccgtaaaaaggccgcgttgctggcgtttttccataggctccgcccccctgacgagcatcacaaaaatcgacgctcaagtcagaggtggcgaaacccgacaggactataaagataccaggcgtttccccctggaagctccctcgtgcgctctcctgttccgaccctgccgcttaccggatacctgtccgcctttctcccttcgggaagcgtggcgctttctcaatgctcacgctgtaggtatctcagttcggtgtaggtcgttcgctccaagctgggctgtgtgcacgaaccccccgttcagcccgaccgctgcgccttatccggtaactatcgtcttgagtccaacccggtaagacacgacttatcgccactggcagcagccactggtaacaggattagcagagcgaggtatgtaggcggtgctacagagttcttgaagtggtggcctaactacggctacactagaaggacagtatttggtatctgcgctctgctgaagccagttaccttcggaaaaagagttggtagctcttgatccggcaaacaaaccaccgctggtagcggtggtttttttgtttgcaagcagcagattacgcgcagaaaaaaaggatctcaagaagatcctttgatcttttctacggggtctgacgctcagtggaacgaaaactcacgttaagggattttggtcatgagattatcaaaaaggatcttcacctagatccttttaaattaaaaatgaagttttaaatcaatctaaagtatatatgagtaaacttggtctgacagttaccaatgcttaatcagtgaggcacctatctcagcgatctgtctatttcgttcatccatagttgcctgactccccgtcgtgtagataactacgatacgggagggcttaccatctggccccagtgctgcaatgataccgcgagacccacgctcaccggctccagatttatcagcaataaaccagccagccggaagggccgagcgcagaagtggtcctgcaactttatccgcctccatccagtctattaattgttgccgggaagctagagtaagtagttcgccagttaatagtttgcgcaacgttgttgccattgctacaggcatcgtggtgtcacgctcgtcgtttggtatggcttcattcagctccggttcccaacgatcaaggcgagttacatgatcccccatgttgtgcaaaaaagcggttagctccttcggtcctccgatcgttgtcagaagtaagttggccgcagtgttatcactcatggttatggcagcactgcataattctcttactgtcatgccatccgtaagatgcttttctgtgactggtgagtactcaaccaagtcattctgagaatagtgtatgcggcgaccgagttgctc

SEQ ID NO: 280 - DNA, 6768 bp, Artificial Sequence
  Synthetic
gacggatcgggagatctcccgatcccctatggtgcactctcagtacaatctgctctgatgccgcatagttaagccagtatctgctccctgcttgtgtgttggaggtcgctgagtagtgcgcgagcaaaatttaagctacaacaaggcaaggcttgaccgacaattgcatgaagaatctgcttagggttaggcgttttgcgctgcttcgcgatgtacgggccagatatacgcgttgacattgattattgactagttattaatagtaatcaattacggggtcattagttcatagcccatatatggagttccgcgttacataacttacggtaaatggcccgcctggctgaccgcccaacgacccccgcccattgacgtcaataatgacgtatgttcccatagtaacgccaatagggactttccattgacgtcaatgggtggagtatttacggtaaactgcccacttggcagtacatcaagtgtatcatatgccaagtacgccccctattgacgtcaatgacggtaaatggcccgcctggcattatgcccagtacatgaccttatgggactttcctacttggcagtacatctacgtattagtcatcgctattaccatggtgatgcggttttggcagtacatcaatgggcgtggatagcggtttgactcacggggatttccaagtctccaccccattgacgtcaatgggagtttgttttggcaccaaaatcaacgggactttccaaaatgtcgtaacaactccgccccattgacgcaaatgggcggtaggcgtgtacggtgggaggtctatataagcagagctctctggctaactagagaacccactgcttactggcttatcgaaattaatacgactcactatagggagacccaagctggctagcgtttaaacttaagcttggtaccgagctcggatccgccaccatgggcaaacggacagccgacggaagcgagttcgagtcaccgaaaaagaagcgaaaagttggctccggagactacaaggaccacgacggtgactacaaggaccacgacatcgactacaaggacgacgacgacaagtccggaatggcctttctgttcagccctaaggccagagccttttctgatgagtctctggaatcctacctgctgagggtggtgtctgagaatctgttcgacagctacgagggcctgagcctggctatccgggaagaactgcacgacctggatttcgaggcccacggcgcctttccaatcgatctgaaaagactgaatgtgtaccacgccaagcacaacagccactttagaatgcgggccctgggcctgctggaaaccctgctggacctgcctagatacgagctgcaaaaactggccctgctgaagagcgacttcaacttcaatagcagcgtcgccctgtacaacaacggcgtggacatccccctgagattcatcagacaccacgccgagggagctgtggattctatccctgtgtgcagccaatgtctggccgaagaggcctatatcaaacagagctggcacatcaagtgggtcaacgcctgcaccaagcaccagtgtgctctgcttcataattgccccgactgctgcgcccctattaactacatcgagaacgagagcatcacccactgctcctgcggcttcgagctgtcttgtgccagaagctctccaagcaacaccctgagcatcaagcacctgaacaagctgttggataagggcgagagaaacgacagcaaccccctgttcaacaacaccacacttacagaacggttcgccgccctgctgtggtatcaggagcgctacagccagaccgacaatttctgcctgaacgatgccgtgaactacttcagcaagtggcctgccgtgttcaacacagagctggatgaactgtccaagaacgctgaaatgaaactgatcgacctgtttaacaagacagagttcaagttcatcttcggcgacgccattctggcatgcccttcaacacagaagcagagagagtaccacttcatctacggcgccctgctggactacctggtgaccctggtggaatctaatcctaagaccaagaagcccaacgcagccgacctgctcgtgtccgttctggaagctgccaccctgctgggaaccagcgtggaacaggtgtatagactgtatcaggacggcatcctgcagaccgccttcagacataagatgaaccagcggatcaacccttacaaaggagctttcttcctgcggcacgtgatcgagtacaagaccagcttcggcaacgacaaggcccggatgtacctgagcgcctggtaattacattggaagtggataatctagagggcccgtttaaacccgctgatcagcctcgactgtgccttctagttgccagccatctgttgtttgcccctcccccgtgccttccttgaccctggaaggtgccactcccactgtcctttcctaataaaatgaggaaattgcatcgcattgtctgagtaggtgtcattctattctggggggtggggtggggcaggacagcaagggggaggattgggaagacaatagcaggcatgctggggatgcggtgggctctatggcttctgaggcggaaagaaccagctggggctctagggggtatccccacgcgccctgtagcggcgcattaagcgcggcgggtgtggtggttacgcgcagcgtgaccgctacacttgccagcgccctagcgcccgctcctttcgctttcttcccttcctttctcgccacgttcgccggctttccccgtcaagctctaaatcgggggctccctttagggttccgatttagtgctttacggcacctcgaccccaaaaaacttgattagggtgatggttcacgtagtgggccatcgccctgatagacggtttttcgccctttgacgttggagtccacgttctttaatagtggactcttgttccaaactggaacaacactcaaccctatctcggtctattcttttgatttataagggattttgccgatttcggcctattggttaaaaaatgagctgatttaacaaaaatttaacgcgaattaattctgtggaatgtgtgtcagttagggtgtggaaagtccccaggctccccagcaggcagaagtatgcaaagcatgcatctcaattagtcagcaaccaggtgtggaaagtccccaggctccccagcaggcagaagtatgcaaagcatgcatctcaattagtcagcaaccatagtcccgcccctaactccgcccatcccgcccctaactccgcccagttccgcccattctccgccccatggctgactaattttttttatttatgcagaggccgaggccgcctctgcctctgagctattccagaagtagtgaggaggcttttttggaggcctaggcttttgcaaaaagctcccgggagcttgtatatccattttcggatctgatcaagagacaggatgaggatcgtttcgcatgattgaacaagatggattgcacgcaggttctccggccgcttgggtggagaggctattcggctatgactgggcacaacagacaatcggctgctctgatgccgccgtgttccggctgtcagcgcaggggcgcccggttctttttgtcaagaccgacctgtccggtgccctgaatgaactgcaggacgaggcagcgcggctatcgtggctggccacgacgggcgttccttgcgcagctgtgctcgacgttgtcactgaagcgggaagggactggctgctattgggcgaagtgccggggcaggatctcctgtcatctcaccttgctcctgccgagaaagtatccatcatggctgatgcaatgcggcggctgcatacgcttgatccggctacctgcccattcgaccaccaagcgaaacatcgcatcgagcgagcacgtactcggatggaagccggtcttgtcgatcaggatgatctggacgaagagcatcaggggctcgcgccagccgaactgttcgccaggctcaaggcgcgcatgcccgacggcgaggatctcgtcgtgacccatggcgatgcctgcttgccgaatatcatggtggaaaatggccgcttttctggattcatcgactgtggccggctgggtgtggcggaccgctatcaggacatagcgttggctacccgtgatattgctgaagagcttggcggcgaatgggctgaccgcttcctcgtgctttacggtatcgccgctcccgattcgcagcgcatcgccttctatcgccttcttgacgagttcttctgagcgggactctggggttcgaaatgaccgaccaagcgacgcccaacctgccatcacgagatttcgattccaccgccgccttctatgaaaggttgggcttcggaatcgttttccgggacgccggctggatgatcctccagcgcggggatctcatgctggagttcttcgcccaccccaacttgtttattgcagcttataatggttacaaataaagcaatagcatcacaaatttcacaaataaagcatttttttcactgcattctagttgtggtttgtccaaactcatcaatgtatcttatcatgtctgtataccgtcgacctctagctagagcttggcgtaatcatggtcatagctgtttcctgtgtgaaattgttatccgctcacaattccacacaacatacgagccggaagcataaagtgtaaagcctggggtgcctaatgagtgagctaactcacattaattgcgttgcgctcactgcccgctttccagtcgggaaacctgtcgtgccagctgcattaatgaatcggccaacgcgcggggagaggcggtttgcgtattgggcgctcttccgcttcctcgctcactgactcgctgcgctcggtcgttcggctgcggcgagcggtatcagctcactcaaaggcggtaatacggttatccacagaatcaggggataacgcaggaaagaacatgtgagcaaaaggccagcaaaaggccaggaaccgtaaaaaggccgcgttgctggcgtttttccataggctccgcccccctgacgagcatcacaaaaatcgacgctcaagtcagaggtggcgaaacccgacaggactataaagataccaggcgtttccccctggaagctccctcgtgcgctctcctgttccgaccctgccgcttaccggatacctgtccgcctttctcccttcgggaagcgtggcgctttctcatagctcacgctgtaggtatctcagttcggtgtaggtcgttcgctccaagctgggctgtgtgcacgaaccccccgttcagcccgaccgctgcgccttatccggtaactatcgtcttgagtccaacccggtaagacacgacttatcgccactggcagcagccactggtaacaggattagcagagcgaggtatgtaggcggtgctacagagttcttgaagtggtggcctaactacggctacactagaagaacagtatttggtatctgcgctctgctgaagccagttaccttcggaaaaagagttggtagctcttgatccggcaaacaaaccaccgctggtagcggtttttttgtttgcaagcagcagattacgcgcagaaaaaaaggatctcaagaagatcctttgatcttttctacggggtctgacgctcagtggaacgaaaactcacgttaagggattttggtcatgagattatcaaaaaggatcttcacctagatccttttaaattaaaaatgaagttttaaatcaatctaaagtatatatgagtaaacttggtctgacagttaccaatgcttaatcagtgaggcacctatctcagcgatctgtctatttcgttcatccatagttgcctgactccccgtcgtgtagataactacgatacgggagggcttaccatctggccccagtgctgcaatgataccgcgagacccacgctcaccggctccagatttatcagcaataaaccagccagccggaagggccgagcgcagaagtggtcctgcaactttatccgcctccatccagtctattaattgttgccgggaagctagagtaagtagttcgccagttaatagtttgcgcaacgttgttgccattgctacaggcatcgtggtgtcacgctcgtcgtttggtatggcttcattcagctccggttcccaacgatcaaggcgagttacatgatcccccatgttgtgcaaaaaagcggttagctccttcggtcctccgatcgttgtcagaagtaagttggccgcagtgttatcactcatggttatggcagcactgcataattctcttactgtcatgccatccgtaagatgcttttctgtgactggtgagtactcaaccaagtcattctgagaatagtgtatgcggcgaccgagttgctcttgcccggcgtcaatacgggataataccgcgccacatagcagaactttaaaagtgctcatcattggaaaacgttcttcggggcgaaaactctcaaggatcttaccgctgttgagatccagttcgatgtaacccactcgtgcacccaactgatcttcagcatcttttactttcaccagcgtttctgggtgagcaaaaacaggaaggcaaaatgccgcaaaaaagggaataagggcgacacggaaatgttgaatactcatactcttcctttttcaatattattgaagcatttatcagggttattgtctcatgagcggatacatatttgaatgtatttagaaaaataaacaaataggggttccgcgcacatttccccgaaaagtgccacctgacgtc

SEQ ID NO: 281 - DNA, 6768 bp, Artificial Sequence
  Synthetic
gacggatcgggagatctcccgatcccctatggtgcactctcagtacaatctgctctgatgccgcatagttaagccagtatctgctccctgcttgtgtgttggaggtcgctgagtagtgcgcgagcaaaatttaagctacaacaaggcaaggcttgaccgacaattgcatgaagaatctgcttagggttaggcgttttgcgctgcttcgcgatgtacgggccagatatacgcgttgacattgattattgactagttattaatagtaatcaattacggggtcattagttcatagcccatatatggagttccgcgttacataacttacggtaaatggcccgcctggctgaccgcccaacgacccccgcccattgacgtcaataatgacgtatgttcccatagtaacgccaatagggactttccattgacgtcaatgggtggagtatttacggtaaactgcccacttggcagtacatcaagtgtatcatatgccaagtacgccccctattgacgtcaatgacggtaaatggcccgcctggcattatgcccagtacatgaccttatgggactttcctacttggcagtacatctacgtattagtcatcgctattaccatggtgatgcggttttggcagtacatcaatgggcgtggatagcggtttgactcacggggatttccaagtctccaccccattgacgtcaatgggagtttgttttggcaccaaaatcaacgggactttccaaaatgtcgtaacaactccgccccattgacgcaaatgggcggtaggcgtgtacggtgggaggtctatataagcagagctctctggctaactagagaacccactgcttactggcttatcgaaattaatacgactcactatagggagacccaagctggctagcgtttaaacttaagcttggtaccgagctcggatccgccaccatgggcaaacggacagccgacggaagcgagttcgagtcaccgaaaaagaagcgaaaagttggctccggagactacaaggaccacgacggtgactacaaggaccacgacatcgactacaaggacgacgacgacaagtccggaatggcccttctctttagccctaaggccagagcttttagcgacgagagcctggaatcctacctgctgagagtggtgtctgaaaacttcttcgacagctacgagggcctgagcctggctatcagggaagagctgcacgagctggacttcgaggcccacggagccttccccatcgacctgaagcgcctgaatgtgtaccacgccaagcacaacagccacttcagaatgcgggccctgggcctgctggaaaccctgctggacctgcctagatacgagctgcaaaagctggccctgttcaaatctgatattaagtttaattctagcaccgccctgtacaaaaatggcgtggacatcccccacaagttcatcagataccaccctgaagatgctgtggatagcatccctgtttgtccacagtgtctcgccgaggaagcctacatcaagcaatcttggcacatcaaatgggtgaacgcctgtacaaagcaccagtgtgccctgcttcataattgcccagagtgctgcgcccctatcaactacattgagaacgagagcatcacccactgcctgtgcggcttcgagctgacctgcgccagcacctccctgatcaacaccctgtctatcgagcacctgaacaagttcctggataagagcgagagaaacgacagcaacagcctgttcaacaacaccaccctgaccgagagattcgccgccctgctgtggtatcaggagcggtacagccagactgataacttctgcctggacgacgccgtggactacttcagcaagtggcctgccgtgttctacaaggaactggacgagctgagcaagaacgccgagatgaaactgatcgatctgtttaacaaaacagagttcaagttcatcttcggcgacgccatcctggcctgccccagcacacagaagcagagagaacaccactttatctaccgggccctgctggactacctggtcaccctggtcgaatctaatcctaagacaaaaaagcctaacacagctgatctgctcgtgtccgtgctggaagccgctacactgctgggaacaagcgtggaacaggtgtacagactgtatcaggacggcatcctgcagaccgcttccagacacaagatgaaccagcggatcaacccctacaagggcgtgttcttcctgcggcacgtgatcgagtacaagacctccttcggcaacgacaaggccagaatgtacctgagcgcctggtaattacattggaagtggataatctagagggcccgtttaaacccgctgatcagcctcgactgtgccttctagttgccagccatctgttgtttgcccctcccccgtgccttccttgaccctggaaggtgccactcccactgtcctttcctaataaaatgaggaaattgcatcgcattgtctgagtaggtgtcattctattctggggggtggggtggggcaggacagcaagggggaggattgggaagacaatagcaggcatgctggggatgcggtgggctctatggcttctgaggcggaaagaaccagctggggctctagggggtatccccacgcgccctgtagcggcgcattaagcgcggcgggtgtggtggttacgcgcagcgtgaccgctacacttgccagcgccctagcgcccgctcctttcgctttcttcccttcctttctcgccacgttcgccggctttccccgtcaagctctaaatcgggggctccctttagggttccgatttagtgctttacggcacctcgaccccaaaaaacttgattagggtgatggttcacgtagtgggccatcgccctgatagacggtttttcgccctttgacgttggagtccacgttctttaatagtggactcttgttccaaactggaacaacactcaaccctatctcggtctattcttttgatttataagggattttgccgatttcggcctattggttaaaaaatgagctgatttaacaaaaatttaacgcgaattaattctgtggaatgtgtgtcagttagggtgtggaaagtccccaggctccccagcaggcagaagtatgcaaagcatgcatctcaattagtcagcaaccaggtgtggaaagtccccaggctccccagcaggcagaagtatgcaaagcatgcatctcaattagtcagcaaccatagtcccgcccctaactccgcccatcccgcccctaactccgcccagttccgcccattctccgccccatggctgactaattttttttatttatgcagaggccgaggccgcctctgcctctgagctattccagaagtagtgaggaggcttttttggaggcctaggcttttgcaaaaagctcccgggagcttgtatatccattttcggatctgatcaagagacaggatgaggatcgtttcgcatgattgaacaagatggattgcacgcaggttctccggccgcttgggtggagaggctattcggctatgactgggcacaacagacaatcggctgctctgatgccgccgtgttccggctgtcagcgcaggggcgcccggttctttttgtcaagaccgacctgtccggtgccctgaatgaactgcaggacgaggcagcgcggctatcgtggctggccacgacgggcgttccttgcgcagctgtgctcgacgttgtcactgaagcgggaagggactggctgctattgggcgaagtgccggggcaggatctcctgtcatctcaccttgctcctgccgagaaagtatccatcatggctgatgcaatgcggcggctgcatacgcttgatccggctacctgcccattcgaccaccaagcgaaacatcgcatcgagcgagcacgtactcggatggaagccggtcttgtcgatcaggatgatctggacgaagagcatcaggggctcgcgccagccgaactgttcgccaggctcaaggcgcgcatgcccgacggcgaggatctcgtcgtgacccatggcgatgcctgcttgccgaatatcatggtggaaaatggccgcttttctggattcatcgactgtggccggctgggtgtggcggaccgctatcaggacatagcgttggctacccgtgatattgctgaagagcttggcggcgaatgggctgaccgcttcctcgtgctttacggtatcgccgctcccgattcgcagcgcatcgccttctatcgccttcttgacgagttcttctgagcgggactctggggttcgaaatgaccgaccaagcgacgcccaacctgccatcacgagatttcgattccaccgccgccttctatgaaaggttgggcttcggaatcgttttccgggacgccggctggatgatcctccagcgcggggatctcatgctggagttcttcgcccaccccaacttgtttattgcagcttataatggttacaaataaagcaatagcatcacaaatttcacaaataaagcatttttttcactgcattctagttgtggtttgtccaaactcatcaatgtatcttatcatgtctgtataccgtcgacctctagctagagcttggcgtaatcatggtcatagctgtttcctgtgtgaaattgttatccgctcacaattccacacaacatacgagccggaagcataaagtgtaaagcctggggtgcctaatgagtgagctaactcacattaattgcgttgcgctcactgcccgctttccagtcgggaaacctgtcgtgccagctgcattaatgaatcggccaacgcgcggggagaggcggtttgcgtattgggcgctcttccgcttcctcgctcactgactcgctgcgctcggtcgttcggctgcggcgagcggtatcagctcactcaaaggcggtaatacggttatccacagaatcaggggataacgcaggaaagaacatgtgagcaaaaggccagcaaaaggccaggaaccgtaaaaaggccgcgttgctggcgtttttccataggctccgcccccctgacgagcatcacaaaaatcgacgctcaagtcagaggtggcgaaacccgacaggactataaagataccaggcgtttccccctggaagctccctcgtgcgctctcctgttccgaccctgccgcttaccggatacctgtccgcctttctcccttcgggaagcgtggcgctttctcatagctcacgctgtaggtatctcagttcggtgtaggtcgttcgctccaagctgggctgtgtgcacgaaccccccgttcagcccgaccgctgcgccttatccggtaactatcgtcttgagtccaacccggtaagacacgacttatcgccactggcagcagccactggtaacaggattagcagagcgaggtatgtaggcggtgctacagagttcttgaagtggtggcctaactacggctacactagaagaacagtatttggtatctgcgctctgctgaagccagttaccttcggaaaaagagttggtagctcttgatccggcaaacaaaccaccgctggtagcggtttttttgtttgcaagcagcagattacgcgcagaaaaaaaggatctcaagaagatcctttgatcttttctacggggtctgacgctcagtggaacgaaaactcacgttaagggattttggtcatgagattatcaaaaaggatcttcacctagatccttttaaattaaaaatgaagttttaaatcaatctaaagtatatatgagtaaacttggtctgacagttaccaatgcttaatcagtgaggcacctatctcagcgatctgtctatttcgttcatccatagttgcctgactccccgtcgtgtagataactacgatacgggagggcttaccatctggccccagtgctgcaatgataccgcgagacccacgctcaccggctccagatttatcagcaataaaccagccagccggaagggccgagcgcagaagtggtcctgcaactttatccgcctccatccagtctattaattgttgccgggaagctagagtaagtagttcgccagttaatagtttgcgcaacgttgttgccattgctacaggcatcgtggtgtcacgctcgtcgtttggtatggcttcattcagctccggttcccaacgatcaaggcgagttacatgatcccccatgttgtgcaaaaaagcggttagctccttcggtcctccgatcgttgtcagaagtaagttggccgcagtgttatcactcatggttatggcagcactgcataattctcttactgtcatgccatccgtaagatgcttttctgtgactggtgagtactcaaccaagtcattctgagaatagtgtatgcggcgaccgagttgctcttgcccggcgtcaatacgggataataccgcgccacatagcagaactttaaaagtgctcatcattggaaaacgttcttcggggcgaaaactctcaaggatcttaccgctgttgagatccagttcgatgtaacccactcgtgcacccaactgatcttcagcatcttttactttcaccagcgtttctgggtgagcaaaaacaggaaggcaaaatgccgcaaaaaagggaataagggcgacacggaaatgttgaatactcatactcttcctttttcaatattattgaagcatttatcagggttattgtctcatgagcggatacatatttgaatgtatttagaaaaataaacaaataggggttccgcgcacatttccccgaaaagtgccacctgacgtc

SEQ ID NO: 282 - DNA, 6768 bp, Artificial Sequence
  Synthetic
gacggatcgggagatctcccgatcccctatggtgcactctcagtacaatctgctctgatgccgcatagttaagccagtatctgctccctgcttgtgtgttggaggtcgctgagtagtgcgcgagcaaaatttaagctacaacaaggcaaggcttgaccgacaattgcatgaagaatctgcttagggttaggcgttttgcgctgcttcgcgatgtacgggccagatatacgcgttgacattgattattgactagttattaatagtaatcaattacggggtcattagttcatagcccatatatggagttccgcgttacataacttacggtaaatggcccgcctggctgaccgcccaacgacccccgcccattgacgtcaataatgacgtatgttcccatagtaacgccaatagggactttccattgacgtcaatgggtggagtatttacggtaaactgcccacttggcagtacatcaagtgtatcatatgccaagtacgccccctattgacgtcaatgacggtaaatggcccgcctggcattatgcccagtacatgaccttatgggactttcctacttggcagtacatctacgtattagtcatcgctattaccatggtgatgcggttttggcagtacatcaatgggcgtggatagcggtttgactcacggggatttccaagtctccaccccattgacgtcaatgggagtttgttttggcaccaaaatcaacgggactttccaaaatgtcgtaacaactccgccccattgacgcaaatgggcggtaggcgtgtacggtgggaggtctatataagcagagctctctggctaactagagaacccactgcttactggcttatcgaaattaatacgactcactatagggagacccaagctggctagcgtttaaacttaagcttggtaccgagctcggatccgccaccatgggcaaacggacagccgacggaagcgagttcgagtcaccgaaaaagaagcgaaaagttggctccggagactacaaggaccacgacggtgactacaaggaccacgacatcgactacaaggacgacgacgacaagtccggaatggccttcctgttcagccccaagaccagaatcttatccgacgagagcctggagagctacctgctgagagtggtcagcgagaatttcttcgacagctatgagggcctcagcctggccattagagaggaactgcacgatctggacttcgaggcccacggcgcctttcctatcgacctgaaaaagctgaatgtgtaccacgccaagcacaactcccacttcagaatgcgggccctgggcctgctggaaaccctcctgggcctgcctagatatgagctgcaaaaaagagccctgctgaagagcgatacaaagttcaatagctctgctgctatctacaacaacggcgtggacatccctcagagattcattagataccaggccgaagatgccatcgatagcatccccgtgtgccctcaatgtctgagcgaggaagcctacatcaagcagagctggcacatcaagtgggtttccgcatgcactaaacataagtgcgccctgctgtacaactgcccccagtgctgcgcccctatcaactacatcgaaaacgagtctatcacccactgcatctgcggactggaattaagctgtgccagcacctctctgaccaacaccctgtctaatgagaacctgaacaagctgcttgagaaatctgaacggaacgacagcaaccccctgttcaacaacaccaccctgacagagcggttcgccgctctgctgtggtatcaggagaggtacagccagacagaccacttcagactggacgacgtggtggactacttcaacgagtggcctgccgtgttctacaaggaactggacgccctgagcaagaacgctgagatgaaactgatcgacctgtttaacaagaccgagttcaagttcatcttcggcgacgccatcctgtcctgtcctaaccctcagaaacagcgggaacatcactttatcagcaccgccctgctggattacctggtgatcctgctggaatctaatcctaaggccaagaagccaaatgtggctgatctgctggtcagcgtgctggaagtggccacactgctgtctaccagcgtggaacaggtgtatagactgtaccagaacggcatcctgcagaccgctttcagacagaagctgaaccagcggatcaacccataccagggagtgtttttcctgcgccacgtgatcgagtacaagacaagcttcggcaacgacaaggccagaatgtacctgagcgcctggtaattacattggaagtggataatctagagggcccgtttaaacccgctgatcagcctcgactgtgccttctagttgccagccatctgttgtttgcccctcccccgtgccttccttgaccctggaaggtgccactcccactgtcctttcctaataaaatgaggaaattgcatcgcattgtctgagtaggtgtcattctattctggggggtggggtggggcaggacagcaagggggaggattgggaagacaatagcaggcatgctggggatgcggtgggctctatggcttctgaggcggaaagaaccagctggggctctagggggtatccccacgcgccctgtagcggcgcattaagcgcggcgggtgtggtggttacgcgcagcgtgaccgctacacttgccagcgccctagcgcccgctcctttcgctttcttcccttcctttctcgccacgttcgccggctttccccgtcaagctctaaatcgggggctccctttagggttccgatttagtgctttacggcacctcgaccccaaaaaacttgattagggtgatggttcacgtagtgggccatcgccctgatagacggtttttcgccctttgacgttggagtccacgttctttaatagtggactcttgttccaaactggaacaacactcaaccctatctcggtctattcttttgatttataagggattttgccgatttcggcctattggttaaaaaatgagctgatttaacaaaaatttaacgcgaattaattctgtggaatgtgtgtcagttagggtgtggaaagtccccaggctccccagcaggcagaagtatgcaaagcatgcatctcaattagtcagcaaccaggtgtggaaagtccccaggctccccagcaggcagaagtatgcaaagcatgcatctcaattagtcagcaaccatagtcccgcccctaactccgcccatcccgcccctaactccgcccagttccgcccattctccgccccatggctgactaattttttttatttatgcagaggccgaggccgcctctgcctctgagctattccagaagtagtgaggaggcttttttggaggcctaggcttttgcaaaaagctcccgggagcttgtatatccattttcggatctgatcaagagacaggatgaggatcgtttcgcatgattgaacaagatggattgcacgcaggttctccggccgcttgggtggagaggctattcggctatgactgggcacaacagacaatcggctgctctgatgccgccgtgttccggctgtcagcgcaggggcgcccggttctttttgtcaagaccgacctgtccggtgccctgaatgaactgcaggacgaggcagcgcggctatcgtggctggccacgacgggcgttccttgcgcagctgtgctcgacgttgtcactgaagcgggaagggactggctgctattgggcgaagtgccggggcaggatctcctgtcatctcaccttgctcctgccgagaaagtatccatcatggctgatgcaatgcggcggctgcatacgcttgatccggctacctgcccattcgaccaccaagcgaaacatcgcatcgagcgagcacgtactcggatggaagccggtcttgtcgatcaggatgatctggacgaagagcatcaggggctcgcgccagccgaactgttcgccaggctcaaggcgcgcatgcccgacggcgaggatctcgtcgtgacccatggcgatgcctgcttgccgaatatcatggtggaaaatggccgcttttctggattcatcgactgtggccggctgggtgtggcggaccgctatcaggacatagcgttggctacccgtgatattgctgaagagcttggcggcgaatgggctgaccgcttcctcgtgctttacggtatcgccgctcccgattcgcagcgcatcgccttctatcgccttcttgacgagttcttctgagcgggactctggggttcgaaatgaccgaccaagcgacgcccaacctgccatcacgagatttcgattccaccgccgccttctatgaaaggttgggcttcggaatcgttttccgggacgccggctggatgatcctccagcgcggggatctcatgctggagttcttcgcccaccccaacttgtttattgcagcttataatggttacaaataaagcaatagcatcacaaatttcacaaataaagcatttttttcactgcattctagttgtggtttgtccaaactcatcaatgtatcttatcatgtctgtataccgtcgacctctagctagagcttggcgtaatcatggtcatagctgtttcctgtgtgaaattgttatccgctcacaattccacacaacatacgagccggaagcataaagtgtaaagcctggggtgcctaatgagtgagctaactcacattaattgcgttgcgctcactgcccgctttccagtcgggaaacctgtcgtgccagctgcattaatgaatcggccaacgcgcggggagaggcggtttgcgtattgggcgctcttccgcttcctcgctcactgactcgctgcgctcggtcgttcggctgcggcgagcggtatcagctcactcaaaggcggtaatacggttatccacagaatcaggggataacgcaggaaagaacatgtgagcaaaaggccagcaaaaggccaggaaccgtaaaaaggccgcgttgctggcgtttttccataggctccgcccccctgacgagcatcacaaaaatcgacgctcaagtcagaggtggcgaaacccgacaggactataaagataccaggcgtttccccctggaagctccctcgtgcgctctcctgttccgaccctgccgcttaccggatacctgtccgcctttctcccttcgggaagcgtggcgctttctcatagctcacgctgtaggtatctcagttcggtgtaggtcgttcgctccaagctgggctgtgtgcacgaaccccccgttcagcccgaccgctgcgccttatccggtaactatcgtcttgagtccaacccggtaagacacgacttatcgccactggcagcagccactggtaacaggattagcagagcgaggtatgtaggcggtgctacagagttcttgaagtggtggcctaactacggctacactagaagaacagtatttggtatctgcgctctgctgaagccagttaccttcggaaaaagagttggtagctcttgatccggcaaacaaaccaccgctggtagcggtttttttgtttgcaagcagcagattacgcgcagaaaaaaaggatctcaagaagatcctttgatcttttctacggggtctgacgctcagtggaacgaaaactcacgttaagggattttggtcatgagattatcaaaaaggatcttcacctagatccttttaaattaaaaatgaagttttaaatcaatctaaagtatatatgagtaaacttggtctgacagttaccaatgcttaatcagtgaggcacctatctcagcgatctgtctatttcgttcatccatagttgcctgactccccgtcgtgtagataactacgatacgggagggcttaccatctggccccagtgctgcaatgataccgcgagacccacgctcaccggctccagatttatcagcaataaaccagccagccggaagggccgagcgcagaagtggtcctgcaactttatccgcctccatccagtctattaattgttgccgggaagctagagtaagtagttcgccagttaatagtttgcgcaacgttgttgccattgctacaggcatcgtggtgtcacgctcgtcgtttggtatggcttcattcagctccggttcccaacgatcaaggcgagttacatgatcccccatgttgtgcaaaaaagcggttagctccttcggtcctccgatcgttgtcagaagtaagttggccgcagtgttatcactcatggttatggcagcactgcataattctcttactgtcatgccatccgtaagatgcttttctgtgactggtgagtactcaaccaagtcattctgagaatagtgtatgcggcgaccgagttgctcttgcccggcgtcaatacgggataataccgcgccacatagcagaactttaaaagtgctcatcattggaaaacgttcttcggggcgaaaactctcaaggatcttaccgctgttgagatccagttcgatgtaacccactcgtgcacccaactgatcttcagcatcttttactttcaccagcgtttctgggtgagcaaaaacaggaaggcaaaatgccgcaaaaaagggaataagggcgacacggaaatgttgaatactcatactcttcctttttcaatattattgaagcatttatcagggttattgtctcatgagcggatacatatttgaatgtatttagaaaaataaacaaataggggttccgcgcacatttccccgaaaagtgccacctgacgtc

SEQ ID NO: 283 - DNA, 9447 bp, Artificial Sequence
  Synthetic
gacggatcgggagatctcccgatcccctatggtgcactctcagtacaatctgctctgatgccgcatagttaagccagtatctgctccctgcttgtgtgttggaggtcgctgagtagtgcgcgagcaaaatttaagctacaacaaggcaaggcttgaccgacaattgcatgaagaatctgcttagggttaggcgttttgcgctgcttcgcgatgtacgggccagatatacgcgttgacattgattattgactagttattaatagtaatcaattacggggtcattagttcatagcccatatatggagttccgcgttacataacttacggtaaatggcccgcctggctgaccgcccaacgacccccgcccattgacgtcaataatgacgtatgttcccatagtaacgccaatagggactttccattgacgtcaatgggtggagtatttacggtaaactgcccacttggcagtacatcaagtgtatcatatgccaagtacgccccctattgacgtcaatgacggtaaatggcccgcctggcattatgcccagtacatgaccttatgggactttcctacttggcagtacatctacgtattagtcatcgctattaccatggtgatgcggttttggcagtacatcaatgggcgtggatagcggtttgactcacggggatttccaagtctccaccccattgacgtcaatgggagtttgttttggcaccaaaatcaacgggactttccaaaatgtcgtaacaactccgccccattgacgcaaatgggcggtaggcgtgtacggtgggaggtctatataagcagagctctctggctaactagagaacccactgcttactggcttatcgaaattaatacgactcactatagggagacccaagctggctagcgtttaaacttaagcttgccaccatggagctgtgcaacatcctgaagtacgacaggtctctgtatcccggcaaggccgtgttcttttacaagaccgccgacagcgattttgtgccactggaggccgatatcaacaagatcaggggaccaaagagcggcttcaccgaggcctttacacctcagttctctccaaagaatatcagccctcaggacctgacccacaacaatatcctgacactggaggagtgctatgtgccccctaacgtggagcacatcttctgtaggttttctctgcgcgtgcaggccaatagcctggtgcccagcggctgctccgatcctgaggtgttttccctgctgaaggagctggccgagaccttcaaggagtgcggaggatacaaggagctggccgtgcggtattgtagaaacatcctgatcggcacatggctgtggcggaaccagaataccggcaatacacagatcgagatcaagacctctaagggcagctgttacctgatcgacaacacaagaaagctggcctgggagagcaagtgggcctccgacgatctgaaggtgctggaggagctgtccaacgagatcgagtctgccctgaccgaccctaacgtgttctggagcgccgatatcacagccaagatcgaggcctccttctgccaggaaatctacccatctcagatcctgaacgacaaggtgaagcagggcgaggcctccaagcagtttgtgaaggccaagtgtgccgatggccggtatgccgtgtccttcaattctgtgaagatcggcgccgccctgcagagcatcgacgattggtgggacgaggatgcctccaagaggctgcgcgtgcacgagttcggagcagacaaggagatcggagtggcacggagaccacccgatagcgagcagaacttttactccatcttcaagaataccgagtggtatctgtccgccctgaagaattgtatcacaaacaagaatgagaagatcgatcccgccatctactatctgttttctgtgctgatcaagggcggcatgttccagaagaaggccgaggccaagaaggccggctccggaaaaagaaccgccgacggcagcgaattcgagtcacccaagaagaagaggaaagtcgggtcctccgagggaaggggctctctgctgacctgcggcgacgtggaggagaaccctggacccggaatgggccacctgaaggagctgctggagatcaccgacaccacagagagggatcgctccctgcggagagccttctctccctacaccgccatgatcgacatcacaggctccgaggccgtggccctgatcatcctgctgaatctgacatatcgcaagaaccaggtggacgatctgctggacaagaagctggccaagcaggccctgaagagcgaggatcacatcaacaagtgcatcaaggagatcgcctggtttcacacccacaatctgaagtacccagatatccgggtgtccaagcagaacctggccgtggagccccctacactgcactcttatgtgctgagctccgccaattaccccaaggcctatggctggagccacaattccgccaaggtgaactttgccaagctgttcgtgagctactttaagtggcagaaccaggtgtcctggctggcccaggtgctggccaccaatagcgacaactggaagtctgccttcacaagcctgggcctgtccgtgaaggccttcaagagcctgtgcgtgaccgtgaagaatagcctgcctgaggaggccatcccagactccgtggataggtattctcgccagatcagaatgccataccacgacggctatctggccgtgacccccgtgatcagccacgtggtgcagtccaagatccagcaggccgccatcgataagcgggccagattctccaacgtggagtttacacgcccagcagccgtgtctatgctggccgccagcctgggaggcgtgatcaatgtgctgaactacccaccctatatcagaagcaagtaccacggcctgtctaatagcagggccttcaagctgaacaatggccagaccgtgtttaacgtggaggccctgctgaagcctgagctgatcaaggccctggagggcatcatcttctccaacaatgccctggccctgaagcagaggcgccagcagaaggtgaagaatatcaaggagctgcgcaacacactgctggagtggttctctccagtgtttgagtggcggctggacgccatcgagaatggctacgatctggagcagctggagtccgcctctgagagactggagtataagatcctgtccctgcccgacaatgagctgccttctctgaccatcccactgttcagactgctgaacgagatgctgggcggcgtgagcatgacacagaggtacgcctttcaccccaagctgatgtcccctctgaaggccgccctgcagtggctgctggtgaatctgaccgaccagaagcacgtgctgatcgaggaggacgatgagcactacagatatctgcacctgtccggcatcagggtgtttgatgcccaggccctgtctaacccatactgctctggcatccccagcctgacagccgtgtggggaatgatccactcttatcagaggaagctgaatgaggccctgggcaccaacgtgcggttcaccagcttcagctggttcatcagaaactacagcgccgtggcaggcaagaagctgcccgagctgagcctgcagggagcacagcagtccagactgaagaggcctggcatcatcgacggcaagtactgtgacctggtgttcgatctgatcatccacatcgatggctatgaggacgatctgcaggccgtggacagcaagcctgatatcctgaaggcccacttcccatccaattttgcaggaggcgtgatgcaccagccagagctgaactctaatatcaactggtgctgtctgtatagcaatgagaaccagctgtttgagaagctgcggagactgcccctgtccggctgctgggtcatgcctaccgagcacaagatccaggacctggatgagctgctgctgctgctgaactctgacagcaagctgtccccttctatgatgggctacatgctgctgaccgagccaatggcccgcgtgggcagcctggagcggctgcactgttacgccgagcctgccatcggcgtggtgaagtatgaggccgccacatctgtgaggctgaagggcatcggcaattatttcaacagcgccttttggatgctggatgcccaggagaagttcatgctgatgaagaaggtgggaagcggcaagcggactgctgatggcagtgaatttgagtccccaaagaagaagagaaaggtgggctcgagcgagggaaggggctccctgctgacttgtggcgacgtggaggagaaccctggccccagcatgggccagagatactactttaccgtgcatttcctgcctaaacaagccaatctggccctgctgacaggcagatgcatcagcatcatgcacggctttatcctgaagcacaacatcgagggaatgggcgttaccttcccagcctggtccgacagcagcatcggcaacgaaattgccttcgtgtacaccgacaaggaaatcctcaacacactgaaggaccaggcctacttcgtggatatgcaggattgcggcttcttcaaggtctcccaagtgctggctgtgcccgattcttgcgaggaagtgcggttcatccggaaccaggccgtggccaaaatcttcaccggagagagcagaagaaggctgaaaagactgcagaagagagccctggccagaggcgaagatttcaaccccaagaagatcgaggcccctcgggaaatcgatatcttccacagagtggccatgaccagcaagagctctcaggaggactacatcctgcacatccagaaacaggacgtggactgtcaggctgagccttactttagcaattacggcctggccagcaacgagaagttcaagggaacagtgcctgacctgagccccagcatcgacagaaacgggtctggaaagcgcaccgccgatggttccgagttcgaaagccccaaaaaaaagcgcaaggtctgagcggccgctcgagtctagagggcccgtttaaacccgctgatcagcctcgactgtgccttctagttgccagccatctgttgtttgcccctcccccgtgccttccttgaccctggaaggtgccactcccactgtcctttcctaataaaatgaggaaattgcatcgcattgtctgagtaggtgtcattctattctggggggtggggtggggcaggacagcaagggggaggattgggaagacaatagcaggcatgctggggatgcggtgggctctatggcttctgaggcggaaagaaccagctggggctctagggggtatccccacgcgccctgtagcggcgcattaagcgcggcgggtgtggtggttacgcgcagcgtgaccgctacacttgccagcgccctagcgcccgctcctttcgctttcttcccttcctttctcgccacgttcgccggctttccccgtcaagctctaaatcgggggctccctttagggttccgatttagtgctttacggcacctcgaccccaaaaaacttgattagggtgatggttcacgtagtgggccatcgccctgatagacggtttttcgccctttgacgttggagtccacgttctttaatagtggactcttgttccaaactggaacaacactcaaccctatctcggtctattcttttgatttataagggattttgccgatttcggcctattggttaaaaaatgagctgatttaacaaaaatttaacgcgaattaattctgtggaatgtgtgtcagttagggtgtggaaagtccccaggctccccagcaggcagaagtatgcaaagcatgcatctcaattagtcagcaaccaggtgtggaaagtccccaggctccccagcaggcagaagtatgcaaagcatgcatctcaattagtcagcaaccatagtcccgcccctaactccgcccatcccgcccctaactccgcccagttccgcccattctccgccccatggctgactaattttttttatttatgcagaggccgaggccgcctctgcctctgagctattccagaagtagtgaggaggcttttttggaggcctaggcttttgcaaaaagctcccgggagcttgtatatccattttcggatctgatcaagagacaggatgaggatcgtttcgcatgattgaacaagatggattgcacgcaggttctccggccgcttgggtggagaggctattcggctatgactgggcacaacagacaatcggctgctctgatgccgccgtgttccggctgtcagcgcaggggcgcccggttctttttgtcaagaccgacctgtccggtgccctgaatgaactgcaggacgaggcagcgcggctatcgtggctggccacgacgggcgttccttgcgcagctgtgctcgacgttgtcactgaagcgggaagggactggctgctattgggcgaagtgccggggcaggatctcctgtcatctcaccttgctcctgccgagaaagtatccatcatggctgatgcaatgcggcggctgcatacgcttgatccggctacctgcccattcgaccaccaagcgaaacatcgcatcgagcgagcacgtactcggatggaagccggtcttgtcgatcaggatgatctggacgaagagcatcaggggctcgcgccagccgaactgttcgccaggctcaaggcgcgcatgcccgacggcgaggatctcgtcgtgacccatggcgatgcctgcttgccgaatatcatggtggaaaatggccgcttttctggattcatcgactgtggccggctgggtgtggcggaccgctatcaggacatagcgttggctacccgtgatattgctgaagagcttggcggcgaatgggctgaccgcttcctcgtgctttacggtatcgccgctcccgattcgcagcgcatcgccttctatcgccttcttgacgagttcttctgagcgggactctggggttcgaaatgaccgaccaagcgacgcccaacctgccatcacgagatttcgattccaccgccgccttctatgaaaggttgggcttcggaatcgttttccgggacgccggctggatgatcctccagcgcggggatctcatgctggagttcttcgcccaccccaacttgtttattgcagcttataatggttacaaataaagcaatagcatcacaaatttcacaaataaagcatttttttcactgcattctagttgtggtttgtccaaactcatcaatgtatcttatcatgtctgtataccgtcgacctctagctagagcttggcgtaatcatggtcatagctgtttcctgtgtgaaattgttatccgctcacaattccacacaacatacgagccggaagcataaagtgtaaagcctggggtgcctaatgagtgagctaactcacattaattgcgttgcgctcactgcccgctttccagtcgggaaacctgtcgtgccagctgcattaatgaatcggccaacgcgcggggagaggcggtttgcgtattgggcgctcttccgcttcctcgctcactgactcgctgcgctcggtcgttcggctgcggcgagcggtatcagctcactcaaaggcggtaatacggttatccacagaatcaggggataacgcaggaaagaacatgtgagcaaaaggccagcaaaaggccaggaaccgtaaaaaggccgcgttgctggcgtttttccataggctccgcccccctgacgagcatcacaaaaatcgacgctcaagtcagaggtggcgaaacccgacaggactataaagataccaggcgtttccccctggaagctccctcgtgcgctctcctgttccgaccctgccgcttaccggatacctgtccgcctttctcccttcgggaagcgtggcgctttctcatagctcacgctgtaggtatctcagttcggtgtaggtcgttcgctccaagctgggctgtgtgcacgaaccccccgttcagcccgaccgctgcgccttatccggtaactatcgtcttgagtccaacccggtaagacacgacttatcgccactggcagcagccactggtaacaggattagcagagcgaggtatgtaggcggtgctacagagttcttgaagtggtggcctaactacggctacactagaagaacagtatttggtatctgcgctctgctgaagccagttaccttcggaaaaagagttggtagctcttgatccggcaaacaaaccaccgctggtagcggtttttttgtttgcaagcagcagattacgcgcagaaaaaaaggatctcaagaagatcctttgatcttttctacggggtctgacgctcagtggaacgaaaactcacgttaagggattttggtcatgagattatcaaaaaggatcttcacctagatccttttaaattaaaaatgaagttttaaatcaatctaaagtatatatgagtaaacttggtctgacagttaccaatgcttaatcagtgaggcacctatctcagcgatctgtctatttcgttcatccatagttgcctgactccccgtcgtgtagataactacgatacgggagggcttaccatctggccccagtgctgcaatgataccgcgagacccacgctcaccggctccagatttatcagcaataaaccagccagccggaagggccgagcgcagaagtggtcctgcaactttatccgcctccatccagtctattaattgttgccgggaagctagagtaagtagttcgccagttaatagtttgcgcaacgttgttgccattgctacaggcatcgtggtgtcacgctcgtcgtttggtatggcttcattcagctccggttcccaacgatcaaggcgagttacatgatcccccatgttgtgcaaaaaagcggttagctccttcggtcctccgatcgttgtcagaagtaagttggccgcagtgttatcactcatggttatggcagcactgcataattctcttactgtcatgccatccgtaagatgcttttctgtgactggtgagtactcaaccaagtcattctgagaatagtgtatgcggcgaccgagttgctcttgcccggcgtcaatacgggataataccgcgccacatagcagaactttaaaagtgctcatcattggaaaacgttcttcggggcgaaaactctcaaggatcttaccgctgttgagatccagttcgatgtaacccactcgtgcacccaactgatcttcagcatcttttactttcaccagcgtttctgggtgagcaaaaacaggaaggcaaaatgccgcaaaaaagggaataagggcgacacggaaatgttgaatactcatactcttcctttttcaatattattgaagcatttatcagggttattgtctcatgagcggatacatatttgaatgtatttagaaaaataaacaaataggggttccgcgcacatttccccgaaaagtgccacctgacgtc

SEQ ID NO: 284 - DNA, 9432 bp, Artificial Sequence
  Synthetic
gacggatcgggagatctcccgatcccctatggtgcactctcagtacaatctgctctgatgccgcatagttaagccagtatctgctccctgcttgtgtgttggaggtcgctgagtagtgcgcgagcaaaatttaagctacaacaaggcaaggcttgaccgacaattgcatgaagaatctgcttagggttaggcgttttgcgctgcttcgcgatgtacgggccagatatacgcgttgacattgattattgactagttattaatagtaatcaattacggggtcattagttcatagcccatatatggagttccgcgttacataacttacggtaaatggcccgcctggctgaccgcccaacgacccccgcccattgacgtcaataatgacgtatgttcccatagtaacgccaatagggactttccattgacgtcaatgggtggagtatttacggtaaactgcccacttggcagtacatcaagtgtatcatatgccaagtacgccccctattgacgtcaatgacggtaaatggcccgcctggcattatgcccagtacatgaccttatgggactttcctacttggcagtacatctacgtattagtcatcgctattaccatggtgatgcggttttggcagtacatcaatgggcgtggatagcggtttgactcacggggatttccaagtctccaccccattgacgtcaatgggagtttgttttggcaccaaaatcaacgggactttccaaaatgtcgtaacaactccgccccattgacgcaaatgggcggtaggcgtgtacggtgggaggtctatataagcagagctctctggctaactagagaacccactgcttactggcttatcgaaattaatacgactcactatagggagacccaagctggctagcgtttaaacttaagcttgccaccatggaactctgcaacatcctgaagtacgacaggtccctgtacccaggcaaggctgttttcttctataagacacctgacagcgatttcgtgcccctggaagctgacatcaacaaggtgagaggacctaagagcggatttaccgaggccttcacacctcaattttctcctaaaaatatcagcccccaggacctgacccacaacaacattctgaccctggaagagtgttacgtgccccctaatgtggaacacatcttttgcagatttagcctgcgggtgcaggccaacagcctggtgccttctggctgcagcgaccccgatgtgttcagcctgctggaagaactggccaagaccttcaaggaatgtggcggctacaaggaactggctacaagatactgccggaacatcctgctgggcacctggctgtggcggaaccagaacacaggcaacacccagatcgagatcaagacctctaaaggcagctgctatctgatcggaaacacccggaagctggcctgggagagcaaatgggcctccgacgatctgaaagtgctggaggccctgtccaacgagattgaaagcgctctgacagatcctaatgtgttctggtccgccgacatcaccgccaagatcgaagcctctttttgtcaggaggtgtaccctagccagatcctgaacgacaaggtgaagcaaggcgaggccagcaagcagttcgtgaaggccaaatgcgccgacggccgctacgccgtgagcttcaacagcgtcaagatcggcgccgctctgcagagcgtggacgactggtgggacgaggacgccagcaagagactgagagtgcacgagttcggcgccgataaggagatcggaatcgccagacggcctccaaacagcgagcagaatttctacagcatcttcaagaatacagagtggtatctgtctgccctgaagaactgcatcaccaacaaaaacgagaacatcgaccccgctatctactaccttttctctgtgctgatcaagggcggcatgttccagaaaaaggccgaggcaaagaaggccggctccggaaaaagaaccgccgacggcagcgaattcgagtcacccaagaagaagaggaaagtcgggtcctccgagggaaggggctctctgctgacctgcggcgacgtggaggagaaccctggacccggaatgcacctgaaggaactgctggagatcacagatacaaccgagagagatagactgctgagaagagctttttctccatacaccgccatgatcgacatcaccggcagcgaagcggtggccctgaccatactgttgaacctgacctaccggaagaaccaggtggacgacctgttggataagaaacttgctaagcaggccctgaagagcgaggaccacatcaacaagtgcatcaaggaaatcgcctggttccacacccacaacctgaagtaccctgacatcagagtgtccaagcagaacctggtggttgagcctcctccactgcattcttacgtgctgagcagcgctaactacccgaaggcctacggctggtcccacgatagcgccaaggtgaacgttgccaagctgttcgtgagctactttaagtggcagaaccaggtgtcttggctggctcaagtgctggccaccaacagcgacaactggaagagcgccttcacttctctgggcctgtctgtcaaggctttcaagagcctgtgtgtgaccgtcaagaacagcctaccagaggaggacgtgcctgactctgtggacagatacagccggcagatccgtatgccttaccacgacggctacctggccgtgacccctgtgatcagccacgtggtgcagtccaagatccaacaagctgccatcgacaagagggccagattcagcaacgtggagttcaccagacctgccgctgtgagcatgctggccgcttctctcggaggcgtgatcaatgtgctgaactaccctccttacatccgcagcaagtaccacggcctgagcaattccagagcctttaagctgaacaacggccagaccgtgttcaacgtggaagccctgctgaaacctgaactgatcaaagctctggaaggcatcatcttcagcaacaacgccctggcactgaaacagcggagacagcagaaggtgaagaacatcaaggccctgagaaataccctgctggaatggttcagccctgtgttcgagtggcggctggacgccatcgagaacggctacgacctcgaacagctggagagcgccagcgaaagactggagtacaagatcctcagcctgcctgacaacgagctgccctctctgacaatccctctgttcagactgctgaacgagatgctgggcggagtgagcatgacacagcggtacgcctttcaccccaaactgatgagccctctcaaggccgccctgcagtggctgctgatcaacctgaccaatcagaaaaacgaacttgtggaagaggatgatgagcactacagatacctgcatctgagcggcatcagagtgttcgacgcacaagctctgtccaacccctattgtagcggcatccccagcctgacagccgtgtgggggatgatccacagctaccagcggaagctcaatgaggccctgggtacaaacgtgcggttcacctcattcagctggtttatcagaaactacagcgccgtggtaggaaagaagctgcctgagctgagcctgcagggcgcccagcagagcagactgaagcggcctggcatcatcgacggcaagtactgcgacctggtgtttgatctgattatccacatcgacggctacgaggatgacctgcaggccgtggacagcaagcctgatattctgaaggcccacttccccagcaatttcgccggaggcgtgatgcaccagcctgagctgaacagcaatatcaactggtgctgcctgtactctaacgaaaaccagctgttcgagaagctgcggagactgcccctgtctggctgctgggtcatgccaacagagcacaagatccaggacctggacgagctgctgctgctgctgaacagcgacagcaagctgagtccttctatgatgggctacatgctgctgaccaagcctatggccagagtgggcgctgtggaaagactgcactgctacgccgagcccgccattggcgtggtgaaatatgagacagccatcagcgttagactgaaaggcatcggcaactatttcaatagcgccttctggatgctggatgcccaggagaagttcatgctgatgaaaaaagtcggaagcggcaagcggactgctgatggcagtgaatttgagtccccaaagaagaagagaaaggtgggctcgagcgagggaaggggctccctgctgacttgtggcgacgtggaggagaaccctggccccagcatgaaaagatactacttcaccgtgcatttcctgcctaagcaggctaatctggccctgctgacaggcagatgcatcagcattatgcacggcttcatcctcaagtacaacatcgaaggcatcggcgtgaccttccccgcctggtccgatagctctatcggcaacgtgatcgcctttattcacaaggacatggaaatcctgaacagcctgaaggaacagacctatttcgtggacatgcaggactgcggctttttcaaggtgtcccaagtgctggctgtgccagacagctgcgaggaagtgcggttcatcagaaaccaggccgtggccaagatctttaccggcgaaagcagacggcggctgaagaggctgcagaaaagagccctggctagaggagaggacttcaaccccaaaaaggtcgaggcccctagagagatcgacatcttccacagagtggccatgaccagcaagtcctctcaggaggattacatcctgcacatccagaagcaagacgccggatgtcaggccgagcctatcttcagcaactacggcctggccagcaacgagaagttcaagggcacagttcctgatctgagcagcctgatcgagagcaatgggtctggaaagcgcaccgccgatggttccgagttcgaaagccccaaaaaaaagcgcaaggtctgattctagagggcccgtttaaacccgctgatcagcctcgactgtgccttctagttgccagccatctgttgtttgcccctcccccgtgccttccttgaccctggaaggtgccactcccactgtcctttcctaataaaatgaggaaattgcatcgcattgtctgagtaggtgtcattctattctggggggtggggtggggcaggacagcaagggggaggattgggaagacaatagcaggcatgctggggatgcggtgggctctatggcttctgaggcggaaagaaccagctggggctctagggggtatccccacgcgccctgtagcggcgcattaagcgcggcgggtgtggtggttacgcgcagcgtgaccgctacacttgccagcgccctagcgcccgctcctttcgctttcttcccttcctttctcgccacgttcgccggctttccccgtcaagctctaaatcgggggctccctttagggttccgatttagtgctttacggcacctcgaccccaaaaaacttgattagggtgatggttcacgtagtgggccatcgccctgatagacggtttttcgccctttgacgttggagtccacgttctttaatagtggactcttgttccaaactggaacaacactcaaccctatctcggtctattcttttgatttataagggattttgccgatttcggcctattggttaaaaaatgagctgatttaacaaaaatttaacgcgaattaattctgtggaatgtgtgtcagttagggtgtggaaagtccccaggctccccagcaggcagaagtatgcaaagcatgcatctcaattagtcagcaaccaggtgtggaaagtccccaggctccccagcaggcagaagtatgcaaagcatgcatctcaattagtcagcaaccatagtcccgcccctaactccgcccatcccgcccctaactccgcccagttccgcccattctccgccccatggctgactaattttttttatttatgcagaggccgaggccgcctctgcctctgagctattccagaagtagtgaggaggcttttttggaggcctaggcttttgcaaaaagctcccgggagcttgtatatccattttcggatctgatcaagagacaggatgaggatcgtttcgcatgattgaacaagatggattgcacgcaggttctccggccgcttgggtggagaggctattcggctatgactgggcacaacagacaatcggctgctctgatgccgccgtgttccggctgtcagcgcaggggcgcccggttctttttgtcaagaccgacctgtccggtgccctgaatgaactgcaggacgaggcagcgcggctatcgtggctggccacgacgggcgttccttgcgcagctgtgctcgacgttgtcactgaagcgggaagggactggctgctattgggcgaagtgccggggcaggatctcctgtcatctcaccttgctcctgccgagaaagtatccatcatggctgatgcaatgcggcggctgcatacgcttgatccggctacctgcccattcgaccaccaagcgaaacatcgcatcgagcgagcacgtactcggatggaagccggtcttgtcgatcaggatgatctggacgaagagcatcaggggctcgcgccagccgaactgttcgccaggctcaaggcgcgcatgcccgacggcgaggatctcgtcgtgacccatggcgatgcctgcttgccgaatatcatggtggaaaatggccgcttttctggattcatcgactgtggccggctgggtgtggcggaccgctatcaggacatagcgttggctacccgtgatattgctgaagagcttggcggcgaatgggctgaccgcttcctcgtgctttacggtatcgccgctcccgattcgcagcgcatcgccttctatcgccttcttgacgagttcttctgagcgggactctggggttcgaaatgaccgaccaagcgacgcccaacctgccatcacgagatttcgattccaccgccgccttctatgaaaggttgggcttcggaatcgttttccgggacgccggctggatgatcctccagcgcggggatctcatgctggagttcttcgcccaccccaacttgtttattgcagcttataatggttacaaataaagcaatagcatcacaaatttcacaaataaagcatttttttcactgcattctagttgtggtttgtccaaactcatcaatgtatcttatcatgtctgtataccgtcgacctctagctagagcttggcgtaatcatggtcatagctgtttcctgtgtgaaattgttatccgctcacaattccacacaacatacgagccggaagcataaagtgtaaagcctggggtgcctaatgagtgagctaactcacattaattgcgttgcgctcactgcccgctttccagtcgggaaacctgtcgtgccagctgcattaatgaatcggccaacgcgcggggagaggcggtttgcgtattgggcgctcttccgcttcctcgctcactgactcgctgcgctcggtcgttcggctgcggcgagcggtatcagctcactcaaaggcggtaatacggttatccacagaatcaggggataacgcaggaaagaacatgtgagcaaaaggccagcaaaaggccaggaaccgtaaaaaggccgcgttgctggcgtttttccataggctccgcccccctgacgagcatcacaaaaatcgacgctcaagtcagaggtggcgaaacccgacaggactataaagataccaggcgtttccccctggaagctccctcgtgcgctctcctgttccgaccctgccgcttaccggatacctgtccgcctttctcccttcgggaagcgtggcgctttctcatagctcacgctgtaggtatctcagttcggtgtaggtcgttcgctccaagctgggctgtgtgcacgaaccccccgttcagcccgaccgctgcgccttatccggtaactatcgtcttgagtccaacccggtaagacacgacttatcgccactggcagcagccactggtaacaggattagcagagcgaggtatgtaggcggtgctacagagttcttgaagtggtggcctaactacggctacactagaagaacagtatttggtatctgcgctctgctgaagccagttaccttcggaaaaagagttggtagctcttgatccggcaaacaaaccaccgctggtagcggtggtttttttgtttgcaagcagcagattacgcgcagaaaaaaaggatctcaagaagatcctttgatcttttctacggggtctgacgctcagtggaacgaaaactcacgttaagggattttggtcatgagattatcaaaaaggatcttcacctagatccttttaaattaaaaatgaagttttaaatcaatctaaagtatatatgagtaaacttggtctgacagttaccaatgcttaatcagtgaggcacctatctcagcgatctgtctatttcgttcatccatagttgcctgactccccgtcgtgtagataactacgatacgggagggcttaccatctggccccagtgctgcaatgataccgcgagacccacgctcaccggctccagatttatcagcaataaaccagccagccggaagggccgagcgcagaagtggtcctgcaactttatccgcctccatccagtctattaattgttgccgggaagctagagtaagtagttcgccagttaatagtttgcgcaacgttgttgccattgctacaggcatcgtggtgtcacgctcgtcgtttggtatggcttcattcagctccggttcccaacgatcaaggcgagttacatgatcccccatgttgtgcaaaaaagcggttagctccttcggtcctccgatcgttgtcagaagtaagttggccgcagtgttatcactcatggttatggcagcactgcataattctcttactgtcatgccatccgtaagatgcttttctgtgactggtgagtactcaaccaagtcattctgagaatagtgtatgcggcgaccgagttgctcttgcccggcgtcaatacgggataataccgcgccacatagcagaactttaaaagtgctcatcattggaaaacgttcttcggggcgaaaactctcaaggatcttaccgctgttgagatccagttcgatgtaacccactcgtgcacccaactgatcttcagcatcttttactttcaccagcgtttctgggtgagcaaaaacaggaaggcaaaatgccgcaaaaaagggaataagggcgacacggaaatgttgaatactcatactcttcctttttcaatattattgaagcatttatcagggttattgtctcatgagcggatacatatttgaatgtatttagaaaaataaacaaataggggttccgcgcacatttccccgaaaagtgccacctgacgtc

SEQ ID NO: 285 - DNA, 9432 bp, Artificial Sequence
  Synthetic
gacggatcgggagatctcccgatcccctatggtgcactctcagtacaatctgctctgatgccgcatagttaagccagtatctgctccctgcttgtgtgttggaggtcgctgagtagtgcgcgagcaaaatttaagctacaacaaggcaaggcttgaccgacaattgcatgaagaatctgcttagggttaggcgttttgcgctgcttcgcgatgtacgggccagatatacgcgttgacattgattattgactagttattaatagtaatcaattacggggtcattagttcatagcccatatatggagttccgcgttacataacttacggtaaatggcccgcctggctgaccgcccaacgacccccgcccattgacgtcaataatgacgtatgttcccatagtaacgccaatagggactttccattgacgtcaatgggtggagtatttacggtaaactgcccacttggcagtacatcaagtgtatcatatgccaagtacgccccctattgacgtcaatgacggtaaatggcccgcctggcattatgcccagtacatgaccttatgggactttcctacttggcagtacatctacgtattagtcatcgctattaccatggtgatgcggttttggcagtacatcaatgggcgtggatagcggtttgactcacggggatttccaagtctccaccccattgacgtcaatgggagtttgttttggcaccaaaatcaacgggactttccaaaatgtcgtaacaactccgccccattgacgcaaatgggcggtaggcgtgtacggtgggaggtctatataagcagagctctctggctaactagagaacccactgcttactggcttatcgaaattaatacgactcactatagggagacccaagctggctagcgtttaaacttaagcttgccaccatggaactgtgcaacatcctgaagtacgacagaagcctgtaccctggcaaggccgtctttttctacaagacagccgacagcgacttcgtgccactggaagccgatgtgaacaaggtgcggggccctaagagcggcttcaccgaggccttcacccctcaattttctcctaagaacatcagcccccaggacctgacccacaacaacattctgaccctggaagaatgttacgtgccccccaacgtggaacacatcttctgtagattctctcttcgggtgcaggccaacagcctggcccctagcggatgtagcgatcccgaggtctttagcctgctgaaggaactggccgagacattcaaggaatgcggcggatataaggaactggctacacgctactgcagaaacatcctgctgggcacctggctgtggcggaaccagaataccggcaacacacagatcgaaatcaagaccagcaaaggctcgtgctacctgatcgacaacaccagaaagctggcctgggagtctaagtgggccagcgacgaccagaaggtgctggaagagctgagcaacgagatcgagagcgctctgacagatcctaatgtgttctggtccgccgacatcaccgccaaaatcgaggccagcttctgccaggagatctatccttctcagatcctgaccgacaaggttaagcaaggagaggcctctaaacagttcgtgaaggccaagtgcgccgacggcagatacgccgtgtccttcaacagcgtgaaaatcggcgccgccctgcagagtatcgacgactggtgggacgaggacgccagcaaaagactgagagtgcacgagttcggcgctgataaggagattggcatcgccagacggcctccagatagcgagcagaacttctacagcatctttaagaataccgagtggtatctgtccgccctgaaaaattgcatcacaaacaagaatgagaacatcgaccctggaatctactacctgttctccgtgctgatcaagggcggcatgttccagaagaaaaccgaggcaaagaaagctggctccggaaaaagaaccgccgacggcagcgaattcgagtcacccaagaagaagaggaaagtcgggtcctccgagggaaggggctctctgctgacctgcggcgacgtggaggagaaccctggacccggaatgcacctgaaagaactgcttgagatcacagacaccaccgagagggactcgttgctgagaagagccttcagcccatatacagccatgatcgacatcacaggcagcgaggccatcgccctgatcatcctgctgaacctgacctaccggaagaatcagatcgacgacctgctggataagcaactggccaaacaggccctgaagtctgaggaccacatcaacaagtgcatcaaggaaatcgcctggttccacacacacaacctgaaataccctgacatccgcgtgtccaagcagaacctggctgtggctcctccccagctacacagctacgtgctgagcagcgccaactaccccaaggcctacggctggtcccacgatgccgccaaagtgaacttcgccaagctgttcgtgtcatacttcaagtggcagaatcaagattgctgcctggcccaagtgctggccaccaactctgataactggaagagcgcctttaccagcctgggcctgtctgtgaaggccttcaaatctctgtgcgtgaccatcaaaaagtccctgccagaggaagccattcccgattctgtggatagatacagcagacagatcagaatgccttatcacgatggctacctggcggtcacccctgtgatctcccaggtggtgcagagcaagatccaacaggctgctattgacaagagagccagattcagcaacgtggagttcaccagacctgccgctgtttccatgctggctgccagcctgggcggcgttgtcaatgtgctgaattacccaccttacatcagaaacaagtaccacggcctgagcaacagcagagcctttaagctgaacaacggccagaccgtgttcaacgtggaggccctgctgaagcccgagctgatcaaggctctggaaggcattatcttcagcaacaatgccctggccctgaagcagcggcgccagcaaaaagtgaagaacatcagagatgtgcggagcaccctgctggaatggttttccccaatctacgaatggcggctggacgccatcgagaatggccacgacctggagcagctggagagcgcttctgagcagctggaatacaagatcctgtcactgcctgacaacgaactgccttctctgaccatccctctgttcagactgctgaacgagatgctgggaggcgtgtctatgacacagagatacgccttccaccctaagctgatgagccctctgaaggccgctctgcagtggctgctgatcaacctgacagatcagaaaaacgagttaatcgaggaagatgacgagcactacagatacctgcatctgagcggcatcagagtctttgacgcccaggccctcagcaacccctactgcagcggcatcccttctctgaccgctgtgtggggaatgatccactcttaccagagaaagctcaatgaagccctcggtacaaacgtgcggttcaccagcttcagttggttcatcagggactacagcgccgtggccggcaagaagctgcctgaactgagccttcagggcgcccagcagaacaagctgaagcggcctggcatcatcgacggcaagtattgtgacctgattttcgacctgatcatccacatcgacggctacgaggacgacctgcaggccgtggacagcgaacccggcatactgaaggcacatttccctagcaacttcgccggaggagtgatgcaccagcctgagctgaacagcaacatcaactggtgctgtctgtacagcaatgagaaccagctgtttgagaagctgcggagactgcccctgagcggatgttgggtcatgcccaccgagcacaaaatccaagacctagacgagctgctgcttctgagcaatagctatagcaagttgtctcctagcatgatgggctacatgctgctgacagagcctatggccagagtgggcagcctagagagactgcactgctacgccgagcctgctatcggagtggtcaagtacgaaaccgccatcagcgtgagactgaagggcatcggcaactactttaacagcgccttctgggtgctggatgcccaggagaaattcatgctgatgaaaaagttcggaagcggcaagcggactgctgatggcagtgaatttgagtccccaaagaagaagagaaaggtgggctcgagcgagggaaggggctccctgctgacttgtggcgacgtggaggagaaccctggccccagcatgcaaaggtactactttaccgttcatttcctgcctaagcaggctaatctggccctgctgacaggcagatgcatcagcatcatgcacggcttcatcctgaagcacaacatcgaaggaatgggcgtgacctttcctgcctggtctgatagcagcatcggcaacgtgatcgccttcgtgcacaaggacatggaaatcctgaacagcctgaaggaacagacatatttcgtcgacatgcaggactgcggcttcttcaagctcagccaagtgctggctgtgcccgacatctgcgaggaagtgcggttcattagaaaccaggccgtggccaagatcttcaccggcgagagcagacggcggctgaaaagactgcagaagcgggccctggccagaggagaggacttcaaccccaagaaactggtggcccctagagaggtggacattttccacagaatcgctatgacaagcaagtcctcccaggaggattacatcctgcacatccagaaacagaacgccgattgtcaggccgagcctaccttcagcaactacggctttagctctaatgagaagttcaagggcaccgtgcctgacctgtctccactgatcgaaagcaacgggtctggaaagcgcaccgccgatggttccgagttcgaaagccccaaaaaaaagcgcaaggtctgattctagagggcccgtttaaacccgctgatcagcctcgactgtgccttctagttgccagccatctgttgtttgcccctcccccgtgccttccttgaccctggaaggtgccactcccactgtcctttcctaataaaatgaggaaattgcatcgcattgtctgagtaggtgtcattctattctggggggtggggtggggcaggacagcaagggggaggattgggaagacaatagcaggcatgctggggatgcggtgggctctatggcttctgaggcggaaagaaccagctggggctctagggggtatccccacgcgccctgtagcggcgcattaagcgcggcgggtgtggtggttacgcgcagcgtgaccgctacacttgccagcgccctagcgcccgctcctttcgctttcttcccttcctttctcgccacgttcgccggctttccccgtcaagctctaaatcgggggctccctttagggttccgatttagtgctttacggcacctcgaccccaaaaaacttgattagggtgatggttcacgtagtgggccatcgccctgatagacggtttttcgccctttgacgttggagtccacgttctttaatagtggactcttgttccaaactggaacaacactcaaccctatctcggtctattcttttgatttataagggattttgccgatttcggcctattggttaaaaaatgagctgatttaacaaaaatttaacgcgaattaattctgtggaatgtgtgtcagttagggtgtggaaagtccccaggctccccagcaggcagaagtatgcaaagcatgcatctcaattagtcagcaaccaggtgtggaaagtccccaggctccccagcaggcagaagtatgcaaagcatgcatctcaattagtcagcaaccatagtcccgcccctaactccgcccatcccgcccctaactccgcccagttccgcccattctccgccccatggctgactaattttttttatttatgcagaggccgaggccgcctctgcctctgagctattccagaagtagtgaggaggcttttttggaggcctaggcttttgcaaaaagctcccgggagcttgtatatccattttcggatctgatcaagagacaggatgaggatcgtttcgcatgattgaacaagatggattgcacgcaggttctccggccgcttgggtggagaggctattcggctatgactgggcacaacagacaatcggctgctctgatgccgccgtgttccggctgtcagcgcaggggcgcccggttctttttgtcaagaccgacctgtccggtgccctgaatgaactgcaggacgaggcagcgcggctatcgtggctggccacgacgggcgttccttgcgcagctgtgctcgacgttgtcactgaagcgggaagggactggctgctattgggcgaagtgccggggcaggatctcctgtcatctcaccttgctcctgccgagaaagtatccatcatggctgatgcaatgcggcggctgcatacgcttgatccggctacctgcccattcgaccaccaagcgaaacatcgcatcgagcgagcacgtactcggatggaagccggtcttgtcgatcaggatgatctggacgaagagcatcaggggctcgcgccagccgaactgttcgccaggctcaaggcgcgcatgcccgacggcgaggatctcgtcgtgacccatggcgatgcctgcttgccgaatatcatggtggaaaatggccgcttttctggattcatcgactgtggccggctgggtgtggcggaccgctatcaggacatagcgttggctacccgtgatattgctgaagagcttggcggcgaatgggctgaccgcttcctcgtgctttacggtatcgccgctcccgattcgcagcgcatcgccttctatcgccttcttgacgagttcttctgagcgggactctggggttcgaaatgaccgaccaagcgacgcccaacctgccatcacgagatttcgattccaccgccgccttctatgaaaggttgggcttcggaatcgttttccgggacgccggctggatgatcctccagcgcggggatctcatgctggagttcttcgcccaccccaacttgtttattgcagcttataatggttacaaataaagcaatagcatcacaaatttcacaaataaagcatttttttcactgcattctagttgtggtttgtccaaactcatcaatgtatcttatcatgtctgtataccgtcgacctctagctagagcttggcgtaatcatggtcatagctgtttcctgtgtgaaattgttatccgctcacaattccacacaacatacgagccggaagcataaagtgtaaagcctggggtgcctaatgagtgagctaactcacattaattgcgttgcgctcactgcccgctttccagtcgggaaacctgtcgtgccagctgcattaatgaatcggccaacgcgcggggagaggcggtttgcgtattgggcgctcttccgcttcctcgctcactgactcgctgcgctcggtcgttcggctgcggcgagcggtatcagctcactcaaaggcggtaatacggttatccacagaatcaggggataacgcaggaaagaacatgtgagcaaaaggccagcaaaaggccaggaaccgtaaaaaggccgcgttgctggcgtttttccataggctccgcccccctgacgagcatcacaaaaatcgacgctcaagtcagaggtggcgaaacccgacaggactataaagataccaggcgtttccccctggaagctccctcgtgcgctctcctgttccgaccctgccgcttaccggatacctgtccgcctttctcccttcgggaagcgtggcgctttctcatagctcacgctgtaggtatctcagttcggtgtaggtcgttcgctccaagctgggctgtgtgcacgaaccccccgttcagcccgaccgctgcgccttatccggtaactatcgtcttgagtccaacccggtaagacacgacttatcgccactggcagcagccactggtaacaggattagcagagcgaggtatgtaggcggtgctacagagttcttgaagtggtggcctaactacggctacactagaagaacagtatttggtatctgcgctctgctgaagccagttaccttcggaaaaagagttggtagctcttgatccggcaaacaaaccaccgctggtagcggtggtttttttgtttgcaagcagcagattacgcgcagaaaaaaaggatctcaagaagatcctttgatcttttctacggggtctgacgctcagtggaacgaaaactcacgttaagggattttggtcatgagattatcaaaaaggatcttcacctagatccttttaaattaaaaatgaagttttaaatcaatctaaagtatatatgagtaaacttggtctgacagttaccaatgcttaatcagtgaggcacctatctcagcgatctgtctatttcgttcatccatagttgcctgactccccgtcgtgtagataactacgatacgggagggcttaccatctggccccagtgctgcaatgataccgcgagacccacgctcaccggctccagatttatcagcaataaaccagccagccggaagggccgagcgcagaagtggtcctgcaactttatccgcctccatccagtctattaattgttgccgggaagctagagtaagtagttcgccagttaatagtttgcgcaacgttgttgccattgctacaggcatcgtggtgtcacgctcgtcgtttggtatggcttcattcagctccggttcccaacgatcaaggcgagttacatgatcccccatgttgtgcaaaaaagcggttagctccttcggtcctccgatcgttgtcagaagtaagttggccgcagtgttatcactcatggttatggcagcactgcataattctcttactgtcatgccatccgtaagatgcttttctgtgactggtgagtactcaaccaagtcattctgagaatagtgtatgcggcgaccgagttgctcttgcccggcgtcaatacgggataataccgcgccacatagcagaactttaaaagtgctcatcattggaaaacgttcttcggggcgaaaactctcaaggatcttaccgctgttgagatccagttcgatgtaacccactcgtgcacccaactgatcttcagcatcttttactttcaccagcgtttctgggtgagcaaaaacaggaaggcaaaatgccgcaaaaaagggaataagggcgacacggaaatgttgaatactcatactcttcctttttcaatattattgaagcatttatcagggttattgtctcatgagcggatacatatttgaatgtatttagaaaaataaacaaataggggttccgcgcacatttccccgaaaagtgccacctgacgtc

SEQ ID NO: 286 - DNA, 9435 bp, Artificial Sequence
  Synthetic
gacggatcgggagatctcccgatcccctatggtgcactctcagtacaatctgctctgatgccgcatagttaagccagtatctgctccctgcttgtgtgttggaggtcgctgagtagtgcgcgagcaaaatttaagctacaacaaggcaaggcttgaccgacaattgcatgaagaatctgcttagggttaggcgttttgcgctgcttcgcgatgtacgggccagatatacgcgttgacattgattattgactagttattaatagtaatcaattacggggtcattagttcatagcccatatatggagttccgcgttacataacttacggtaaatggcccgcctggctgaccgcccaacgacccccgcccattgacgtcaataatgacgtatgttcccatagtaacgccaatagggactttccattgacgtcaatgggtggagtatttacggtaaactgcccacttggcagtacatcaagtgtatcatatgccaagtacgccccctattgacgtcaatgacggtaaatggcccgcctggcattatgcccagtacatgaccttatgggactttcctacttggcagtacatctacgtattagtcatcgctattaccatggtgatgcggttttggcagtacatcaatgggcgtggatagcggtttgactcacggggatttccaagtctccaccccattgacgtcaatgggagtttgttttggcaccaaaatcaacgggactttccaaaatgtcgtaacaactccgccccattgacgcaaatgggcggtaggcgtgtacggtgggaggtctatataagcagagctctctggctaactagagaacccactgcttactggcttatcgaaattaatacgactcactatagggagacccaagctggctagcgtttaaacttaagcttgccaccatggaactgtgcaacatcctgaagtacgacagaagcctgtacccaggcaaggccgtgtttttctataagaccatcgacagtgacttcgtgccactcgaagctgacgtgtccaagatcagaggccctaaaagcggcttcaccgaggccttcacccctcaattttctcctaagaatatcagcccccaagacctgacatacaacaacatcctgacactggaggaatgctacgtgccccccaatgtggaacacatcttctgcagattcagcctgagaatccaggccaatagcctggccccttctggatgtagcgaccccaaggtgttcagcctgctcaaagaactggccaccacattcaaggaatgtggcggctacaaggagctggccgtgcggtactgccggaacatcctgctgggcacctggctgtggagaaaccagaacatgggcaacacccagatcgtgatcaaaaccagcaagggcagctgctacctgatcaacaataccagaaacctggcttgggagagcaaatggcctagcgatgatcagaaggttctcgaaaagctgagcaacgagattgagtccgctctgaccgatcctaacgtgttctggtctgccgagatcacagccaagatcgaagcctctttttgtcaggagatctacccctcccagatcctgaatgacaaggtgaaacagggagagccttccaaacagttcgtgaaggctaagtgcgccgacggcagatatgccgtgtctttcaacagcgtgaagatcggcgccgccctgcagagcatcgacgactggtgggacgaggacgccagcaagcggctgcgggtgcacgagttcggcgctgataaggaaatcggcatcacacgcaggcctcctgattctgagctgaacttctacagcatctttaagaacacagagtggtatctgagcgtcctgaagagatacctgaccgacaagaacgagaacatcgaccctgccatctactacctgttcagcgtgctgattaagggcggaatgttccagaagaaggtcgaggccaaaaaggccggctccggaaaaagaaccgccgacggcagcgaattcgagtcacccaagaagaagaggaaagtcgggtcctccgagggaaggggctctctgctgacctgcggcgacgtggaggagaaccctggacccggaatgcatctgaaggaactgctgaagatcacaaacgtgacggaaagagacagaagcctgagaagagccttcagcccttacaccgctacaatcgacatcaccggctctgaggccatcgccctgatcatcctgctgaacctgacctacagaaagagcctggtggacgacctgctggacaaacagctggccaagcaggccctgaaaagcgaggaccacatcaacaagtgcatcaaggaaatcgcctggttccacacacacaacctgaaataccccgacatcagagtgagcaagcagaacctggccgtggaaagacctcctttacactcttatgtgctgagcagcgccaactaccctaaggtgtacggctggagccacgacgccgctaaggtcaacgtggccaagttgttcgtgagctattttaagtggcaggacgagaactactgtctggcccaggtgctggccacctactccgataactggaaggctgtgtttaccagtctgggcctgtccgtgaaggcctttaagagcctgtgcgtgaccgtgaaaaagtccctgcacgaggaaagcgcccctgacagcgtggacagatacagcagacaggttagaatgccctaccaggatggctacgtggccgtgacccctgtgatctctcacgctgtgcagagcaagatccaacaagctgctatcgacaagagagtcagattcagcagcctagagttcaccagacccgccgctgtctccatgctggccgccagcctgggcggagtggtgaacgtgctgaactaccctccagagatccagacaaaataccacggcctgagcaacagcagacagttcaagctgaacaatggccagaccgtgttcaacgtgggcgccctgctaaagcctgagttcatcaccgccctggagggaatcatcttctctaacaacgccctggccctgaagcagcggcggcagcagaaagtgaaaaatatcaacgagctgcgcaacaccctgctggaatggttctctcctgtgttcgagtggcggctggacatcatcgagagcggcaacgatctggaactgcctgagagcgcttctagccaacttgaacacaagattctgagcctgccagacaatgaactgagcagcttaacaatccccctgttcagactgctgaatgagatgctggggagcgtgcacaccacccagagatacgccttccacccccagctgatgagcccactgaaggccgctctgcagtggctgctgatcaacctgacagacaagaagaatgaacccatcgaggagggcggcgagcacggcagatacctgtacctgagcggcattagagtgttcgacgcacaagccctgtccaatccttattgcagcggaatccctagcctgaccgccgtgtggggcatgctgcacagctatcagaggaagctgaacgacgccctggagacaaacgtgcgcttcacctcttttagctggttcatcagagactacagcaatgtggccggaaagaagctccctgagctgagcctgcagggcgcccagcagaacaagctgaagcggccgggcatcatcgacggcaagtactgcgacctggtctttgatctgatagttcacgtggacggctacgagaacgacctgcaggccatcgactacgagcctgacatcgtgaaggcccatttccccagcaatttcgccggcggagtgatgcaccagcctgagctgaccagcaacgtgaactggtgccacctctaccggaacgagaaccagctgtttgagaagctgaggcggctgcccctgtctggttgttgggtgatgcctacagatcacaagatccaggacctcgatgagctgctgatcttgctgaacagcgactccaaactgtcacctagcatgatgggctacatgttgctgacagaccctatggccagagtcggcgctctggaaaagctgcactgctacgccgagccagccatcggcgtggtgaagttcgaaaccgccatttctcttcggctgaaaggcatcagcaactacttcaacaacgccttctggatgctggacatcagagaaaaattcatgctgatgggcaaagtgggaagcggcaagcggactgctgatggcagtgaatttgagtccccaaagaagaagagaaaggtgggctcgagcgagggaaggggctccctgctgacttgtggcgacgtggaggagaaccctggccccagcatgcagagatactacttcagcgtgcatttcctgcctaagcaggctaatctggctctgctgaccggcagatgtatcagcatcatgcacggcttcattctgaagcacaacatcgagggaatgggcgtgacactgcctgcctggtccgacagctctatcggcaacgtgatcgccttcgtccacgtggataaggaaatcctgaacatcttcaagagacagagctactttgtggatatgctggactacggcttcttcaagctgtctcaagtgctggccgtgcccgacaactgccaggaggtgcggttcatcagaaaccaggccatcgccaagatctttacctctgaaaatagacggagactgaaacggctgcagaagcgcgccctggccagaggcgagaacttcaaccccgagaagctgctcaccgcccctagagaagttgacatcttccacagagtggccatgaccagcaagtccagccaggaggactatatcctgcacatccagaaaaagaacgccgactgccaagctgaacctaccttcagcaactacggatttagcagcaacaagaagttcaaaggcacagtgccagacctgagcagcctgatcgagagcaatgggtctggaaagcgcaccgccgatggttccgagttcgaaagccccaaaaaaaagcgcaaggtctgattctagagggcccgtttaaacccgctgatcagcctcgactgtgccttctagttgccagccatctgttgtttgcccctcccccgtgccttccttgaccctggaaggtgccactcccactgtcctttcctaataaaatgaggaaattgcatcgcattgtctgagtaggtgtcattctattctggggggtggggtggggcaggacagcaagggggaggattgggaagacaatagcaggcatgctggggatgcggtgggctctatggcttctgaggcggaaagaaccagctggggctctagggggtatccccacgcgccctgtagcggcgcattaagcgcggcgggtgtggtggttacgcgcagcgtgaccgctacacttgccagcgccctagcgcccgctcctttcgctttcttcccttcctttctcgccacgttcgccggctttccccgtcaagctctaaatcgggggctccctttagggttccgatttagtgctttacggcacctcgaccccaaaaaacttgattagggtgatggttcacgtagtgggccatcgccctgatagacggtttttcgccctttgacgttggagtccacgttctttaatagtggactcttgttccaaactggaacaacactcaaccctatctcggtctattcttttgatttataagggattttgccgatttcggcctattggttaaaaaatgagctgatttaacaaaaatttaacgcgaattaattctgtggaatgtgtgtcagttagggtgtggaaagtccccaggctccccagcaggcagaagtatgcaaagcatgcatctcaattagtcagcaaccaggtgtggaaagtccccaggctccccagcaggcagaagtatgcaaagcatgcatctcaattagtcagcaaccatagtcccgcccctaactccgcccatcccgcccctaactccgcccagttccgcccattctccgccccatggctgactaattttttttatttatgcagaggccgaggccgcctctgcctctgagctattccagaagtagtgaggaggcttttttggaggcctaggcttttgcaaaaagctcccgggagcttgtatatccattttcggatctgatcaagagacaggatgaggatcgtttcgcatgattgaacaagatggattgcacgcaggttctccggccgcttgggtggagaggctattcggctatgactgggcacaacagacaatcggctgctctgatgccgccgtgttccggctgtcagcgcaggggcgcccggttctttttgtcaagaccgacctgtccggtgccctgaatgaactgcaggacgaggcagcgcggctatcgtggctggccacgacgggcgttccttgcgcagctgtgctcgacgttgtcactgaagcgggaagggactggctgctattgggcgaagtgccggggcaggatctcctgtcatctcaccttgctcctgccgagaaagtatccatcatggctgatgcaatgcggcggctgcatacgcttgatccggctacctgcccattcgaccaccaagcgaaacatcgcatcgagcgagcacgtactcggatggaagccggtcttgtcgatcaggatgatctggacgaagagcatcaggggctcgcgccagccgaactgttcgccaggctcaaggcgcgcatgcccgacggcgaggatctcgtcgtgacccatggcgatgcctgcttgccgaatatcatggtggaaaatggccgcttttctggattcatcgactgtggccggctgggtgtggcggaccgctatcaggacatagcgttggctacccgtgatattgctgaagagcttggcggcgaatgggctgaccgcttcctcgtgctttacggtatcgccgctcccgattcgcagcgcatcgccttctatcgccttcttgacgagttcttctgagcgggactctggggttcgaaatgaccgaccaagcgacgcccaacctgccatcacgagatttcgattccaccgccgccttctatgaaaggttgggcttcggaatcgttttccgggacgccggctggatgatcctccagcgcggggatctcatgctggagttcttcgcccaccccaacttgtttattgcagcttataatggttacaaataaagcaatagcatcacaaatttcacaaataaagcatttttttcactgcattctagttgtggtttgtccaaactcatcaatgtatcttatcatgtctgtataccgtcgacctctagctagagcttggcgtaatcatggtcatagctgtttcctgtgtgaaattgttatccgctcacaattccacacaacatacgagccggaagcataaagtgtaaagcctggggtgcctaatgagtgagctaactcacattaattgcgttgcgctcactgcccgctttccagtcgggaaacctgtcgtgccagctgcattaatgaatcggccaacgcgcggggagaggcggtttgcgtattgggcgctcttccgcttcctcgctcactgactcgctgcgctcggtcgttcggctgcggcgagcggtatcagctcactcaaaggcggtaatacggttatccacagaatcaggggataacgcaggaaagaacatgtgagcaaaaggccagcaaaaggccaggaaccgtaaaaaggccgcgttgctggcgtttttccataggctccgcccccctgacgagcatcacaaaaatcgacgctcaagtcagaggtggcgaaacccgacaggactataaagataccaggcgtttccccctggaagctccctcgtgcgctctcctgttccgaccctgccgcttaccggatacctgtccgcctttctcccttcgggaagcgtggcgctttctcatagctcacgctgtaggtatctcagttcggtgtaggtcgttcgctccaagctgggctgtgtgcacgaaccccccgttcagcccgaccgctgcgccttatccggtaactatcgtcttgagtccaacccggtaagacacgacttatcgccactggcagcagccactggtaacaggattagcagagcgaggtatgtaggcggtgctacagagttcttgaagtggtggcctaactacggctacactagaagaacagtatttggtatctgcgctctgctgaagccagttaccttcggaaaaagagttggtagctcttgatccggcaaacaaaccaccgctggtagcggtggtttttttgtttgcaagcagcagattacgcgcagaaaaaaaggatctcaagaagatcctttgatcttttctacggggtctgacgctcagtggaacgaaaactcacgttaagggattttggtcatgagattatcaaaaaggatcttcacctagatccttttaaattaaaaatgaagttttaaatcaatctaaagtatatatgagtaaacttggtctgacagttaccaatgcttaatcagtgaggcacctatctcagcgatctgtctatttcgttcatccatagttgcctgactccccgtcgtgtagataactacgatacgggagggcttaccatctggccccagtgctgcaatgataccgcgagacccacgctcaccggctccagatttatcagcaataaaccagccagccggaagggccgagcgcagaagtggtcctgcaactttatccgcctccatccagtctattaattgttgccgggaagctagagtaagtagttcgccagttaatagtttgcgcaacgttgttgccattgctacaggcatcgtggtgtcacgctcgtcgtttggtatggcttcattcagctccggttcccaacgatcaaggcgagttacatgatcccccatgttgtgcaaaaaagcggttagctccttcggtcctccgatcgttgtcagaagtaagttggccgcagtgttatcactcatggttatggcagcactgcataattctcttactgtcatgccatccgtaagatgcttttctgtgactggtgagtactcaaccaagtcattctgagaatagtgtatgcggcgaccgagttgctcttgcccggcgtcaatacgggataataccgcgccacatagcagaactttaaaagtgctcatcattggaaaacgttcttcggggcgaaaactctcaaggatcttaccgctgttgagatccagttcgatgtaacccactcgtgcacccaactgatcttcagcatcttttactttcaccagcgtttctgggtgagcaaaaacaggaaggcaaaatgccgcaaaaaagggaataagggcgacacggaaatgttgaatactcatactcttcctttttcaatattattgaagcatttatcagggttattgtctcatgagcggatacatatttgaatgtatttagaaaaataaacaaataggggttccgcgcacatttccccgaaaagtgccacctgacgtc

SEQ ID NO: 287 - DNA, 7920 bp, Artificial Sequence
  Synthetic
gacggatcgggagatctcccgatcccctatggtgcactctcagtacaatctgctctgatgccgcatagttaagccagtatctgctccctgcttgtgtgttggaggtcgctgagtagtgcgcgagcaaaatttaagctacaacaaggcaaggcttgaccgacaattgcatgaagaatctgcttagggttaggcgttttgcgctgcttcgcgatgtacgggccagatatacgcgttgacattgattattgactagttattaatagtaatcaattacggggtcattagttcatagcccatatatggagttccgcgttacataacttacggtaaatggcccgcctggctgaccgcccaacgacccccgcccattgacgtcaataatgacgtatgttcccatagtaacgccaatagggactttccattgacgtcaatgggtggagtatttacggtaaactgcccacttggcagtacatcaagtgtatcatatgccaagtacgccccctattgacgtcaatgacggtaaatggcccgcctggcattatgcccagtacatgaccttatgggactttcctacttggcagtacatctacgtattagtcatcgctattaccatggtgatgcggttttggcagtacatcaatgggcgtggatagcggtttgactcacggggatttccaagtctccaccccattgacgtcaatgggagtttgttttggcaccaaaatcaacgggactttccaaaatgtcgtaacaactccgccccattgacgcaaatgggcggtaggcgtgtacggtgggaggtctatataagcagagctctctggctaactagagaacccactgcttactggcttatcgaaattaatacgactcactatagggagacccaagctggctagcgtttaaacttaagcttgccaccatgtacatcagaaacctgagaaagcccagccccaacaagaacgtgttcaagttcgcttctacaaaggtgtccagcgtggtgatgtgcgagagcagcctggagttcgacgcctgcttccaccatgaatacaacgacctcatcgagtcttttggatctcaacctgagggcttcaagtacaaatttatgggcaagagcctgccttatacaccagatgccctgatctcctacaccgataagacccagaaataccacgagtacaagccttacagcaagatcgccagccctctgttcagagccgagttcgccgccaagcgggccgccagcctgaagctgggcatcgacctggtgctggtcaccgacagacagatcagagtgaaccccatcctgaacaatctgaaactgctgcacagatacagcggagtgtacggcatcagcggcatccagaacgagctgctgagcttcatccacaagtccggcgtgatcaagcttaatgacatcagctctcaggtgggcattcctatcggcgaaaccagaagcttcctgtttggcctgatgcacaaaggcctggttaaggccgatctgggatgtgacgacctgaccaacaaccctaccctgtgggccacaccaggcagcggctccggaaaacggacagccgacggaagcgagttcgagtcaccaaagaagaagcggaaagtcggatccggctctggaggcatgaccgatttcttcaacgagtttgacgagagcctcgtgcctctgaaacctcaaacacccacccagtacgtgaagctggacgacgccaacctgatccagagagatctggacaccttttctgataccttcaagaaccaggccctgcagagatacaagttgatcagcaccatcgacaagaagctgagcagaggctggacacagcgcaacctggaccctatcctggatgagctgttcaagggcggcgacgtggtgcggcctaactggcggaccgtggctagatggcggaaaaaatacatcgagtctaacggcgacatcgcctctctggccgacaaaaaccacaagatgggcaaccggaccaacagaatcaaaggcgatgacaagttctttgacaaagccctggaaagattcttggacgctaagcggcctacaatcgccaccgcctatcaatactacaaggacctgatagtcatcgagaatgagagcatcgtggaaggcaagatccctatcatctcttacaacgccttcaacaagagaatcaaggccatccccccctacgccgtggccgtggctagacacggcaaattcaaggctgatcagtggttcgcctactgcgccgcccacgtgccaccaacccgcatcctggagagagtggaaatcgatcacacacctctggacctgatcctgctggacgatgagctgctgatccccatcggcagaccttatctgacactgctcatcgacgtgttcagcggctgcgtgctgggcttccacctgtcctataagagccctagctatgtgtctgccgctaaggccatcacccacgccatcaagcctaagtccttcgatgccctgaacattgagctgcagaacgactggccatgcttcggcaagttcgagaacctggtggtcgacaacggcgccgagttctggtccaagaatctggaacacgcttgtcagagcgccggaatcaacatccaatacaatcctgttagaaagccttggctgaagccctttatcgagcggttcttcggcgtgatgaacgagtacttcctgcctgagctgcctggtaagacctttagcaacatcctggaaaaggaagaatacaagcctgagaaggacgccatcatgaggttcagcacattcgtggaggagttccacagatggatcgccgacgtttaccaccaggacagcaactcccgggagacaagaatccccatcaaacggtggcagcagggcttcgacgcctaccctccactgaccatgaacgaggaagaagagacaagattcagcatgctgatgcggatcagcgacagcagaaccctgacccggaacggatttaaataccaggagctgatgtacgactccacagccctggctgactacagaaagcactaccctcagaccaaggaaacagtgaagaagctgatcaaggtggacccagacgacatcagcaagatctacgtgtacctggaagagctggaaagctacctggaggtgccctgcaccgaccccaccggctacaccgacggcctgagcatctacgagcacaagacaatcaagaaaatcaacagagaggttatccgggaatctaaagattctctgggactggccaaggccagaatggccatacacgagcgggtgaagcaggagcaggaggtgttcatcgaaagcaagaccaaggctaaaatcaccgccgtgaagaagagagcccagattgccgatgtgtctaataccggaaccagcaccatcaaggtgagcgaggaaagcgctgcccctgtgcagaaacatatcagcaatgataacagcgacgattgggccgatgacctggaagcctttgagtgattctagagggcccgtttaaacccgctgatcagcctcgactgtgccttctagttgccagccatctgttgtttgcccctcccccgtgccttccttgaccctggaaggtgccactcccactgtcctttcctaataaaatgaggaaattgcatcgcattgtctgagtaggtgtcattctattctggggggtggggtggggcaggacagcaagggggaggattgggaagacaatagcaggcatgctggggatgcggtgggctctatggcttctgaggcggaaagaaccagctggggctctagggggtatccccacgcgccctgtagcggcgcattaagcgcggcgggtgtggtggttacgcgcagcgtgaccgctacacttgccagcgccctagcgcccgctcctttcgctttcttcccttcctttctcgccacgttcgccggctttccccgtcaagctctaaatcgggggctccctttagggttccgatttagtgctttacggcacctcgaccccaaaaaacttgattagggtgatggttcacgtagtgggccatcgccctgatagacggtttttcgccctttgacgttggagtccacgttctttaatagtggactcttgttccaaactggaacaacactcaaccctatctcggtctattcttttgatttataagggattttgccgatttcggcctattggttaaaaaatgagctgatttaacaaaaatttaacgcgaattaattctgtggaatgtgtgtcagttagggtgtggaaagtccccaggctccccagcaggcagaagtatgcaaagcatgcatctcaattagtcagcaaccaggtgtggaaagtccccaggctccccagcaggcagaagtatgcaaagcatgcatctcaattagtcagcaaccatagtcccgcccctaactccgcccatcccgcccctaactccgcccagttccgcccattctccgccccatggctgactaattttttttatttatgcagaggccgaggccgcctctgcctctgagctattccagaagtagtgaggaggcttttttggaggcctaggcttttgcaaaaagctcccgggagcttgtatatccattttcggatctgatcaagagacaggatgaggatcgtttcgcatgattgaacaagatggattgcacgcaggttctccggccgcttgggtggagaggctattcggctatgactgggcacaacagacaatcggctgctctgatgccgccgtgttccggctgtcagcgcaggggcgcccggttctttttgtcaagaccgacctgtccggtgccctgaatgaactgcaggacgaggcagcgcggctatcgtggctggccacgacgggcgttccttgcgcagctgtgctcgacgttgtcactgaagcgggaagggactggctgctattgggcgaagtgccggggcaggatctcctgtcatctcaccttgctcctgccgagaaagtatccatcatggctgatgcaatgcggcggctgcatacgcttgatccggctacctgcccattcgaccaccaagcgaaacatcgcatcgagcgagcacgtactcggatggaagccggtcttgtcgatcaggatgatctggacgaagagcatcaggggctcgcgccagccgaactgttcgccaggctcaaggcgcgcatgcccgacggcgaggatctcgtcgtgacccatggcgatgcctgcttgccgaatatcatggtggaaaatggccgcttttctggattcatcgactgtggccggctgggtgtggcggaccgctatcaggacatagcgttggctacccgtgatattgctgaagagcttggcggcgaatgggctgaccgcttcctcgtgctttacggtatcgccgctcccgattcgcagcgcatcgccttctatcgccttcttgacgagttcttctgagcgggactctggggttcgaaatgaccgaccaagcgacgcccaacctgccatcacgagatttcgattccaccgccgccttctatgaaaggttgggcttcggaatcgttttccgggacgccggctggatgatcctccagcgcggggatctcatgctggagttcttcgcccaccccaacttgtttattgcagcttataatggttacaaataaagcaatagcatcacaaatttcacaaataaagcatttttttcactgcattctagttgtggtttgtccaaactcatcaatgtatcttatcatgtctgtataccgtcgacctctagctagagcttggcgtaatcatggtcatagctgtttcctgtgtgaaattgttatccgctcacaattccacacaacatacgagccggaagcataaagtgtaaagcctggggtgcctaatgagtgagctaactcacattaattgcgttgcgctcactgcccgctttccagtcgggaaacctgtcgtgccagctgcattaatgaatcggccaacgcgcggggagaggcggtttgcgtattgggcgctcttccgcttcctcgctcactgactcgctgcgctcggtcgttcggctgcggcgagcggtatcagctcactcaaaggcggtaatacggttatccacagaatcaggggataacgcaggaaagaacatgtgagcaaaaggccagcaaaaggccaggaaccgtaaaaaggccgcgttgctggcgtttttccataggctccgcccccctgacgagcatcacaaaaatcgacgctcaagtcagaggtggcgaaacccgacaggactataaagataccaggcgtttccccctggaagctccctcgtgcgctctcctgttccgaccctgccgcttaccggatacctgtccgcctttctcccttcgggaagcgtggcgctttctcatagctcacgctgtaggtatctcagttcggtgtaggtcgttcgctccaagctgggctgtgtgcacgaaccccccgttcagcccgaccgctgcgccttatccggtaactatcgtcttgagtccaacccggtaagacacgacttatcgccactggcagcagccactggtaacaggattagcagagcgaggtatgtaggcggtgctacagagttcttgaagtggtggcctaactacggctacactagaagaacagtatttggtatctgcgctctgctgaagccagttaccttcggaaaaagagttggtagctcttgatccggcaaacaaaccaccgctggtagcggtggtttttttgtttgcaagcagcagattacgcgcagaaaaaaaggatctcaagaagatcctttgatcttttctacggggtctgacgctcagtggaacgaaaactcacgttaagggattttggtcatgagattatcaaaaaggatcttcacctagatccttttaaattaaaaatgaagttttaaatcaatctaaagtatatatgagtaaacttggtctgacagttaccaatgcttaatcagtgaggcacctatctcagcgatctgtctatttcgttcatccatagttgcctgactccccgtcgtgtagataactacgatacgggagggcttaccatctggccccagtgctgcaatgataccgcgagacccacgctcaccggctccagatttatcagcaataaaccagccagccggaagggccgagcgcagaagtggtcctgcaactttatccgcctccatccagtctattaattgttgccgggaagctagagtaagtagttcgccagttaatagtttgcgcaacgttgttgccattgctacaggcatcgtggtgtcacgctcgtcgtttggtatggcttcattcagctccggttcccaacgatcaaggcgagttacatgatcccccatgttgtgcaaaaaagcggttagctccttcggtcctccgatcgttgtcagaagtaagttggccgcagtgttatcactcatggttatggcagcactgcataattctcttactgtcatgccatccgtaagatgcttttctgtgactggtgagtactcaaccaagtcattctgagaatagtgtatgcggcgaccgagttgctcttgcccggcgtcaatacgggataataccgcgccacatagcagaactttaaaagtgctcatcattggaaaacgttcttcggggcgaaaactctcaaggatcttaccgctgttgagatccagttcgatgtaacccactcgtgcacccaactgatcttcagcatcttttactttcaccagcgtttctgggtgagcaaaaacaggaaggcaaaatgccgcaaaaaagggaataagggcgacacggaaatgttgaatactcatactcttcctttttcaatattattgaagcatttatcagggttattgtctcatgagcggatacatatttgaatgtatttagaaaaataaacaaataggggttccgcgcacatttccccgaaaagtgccacctgacgtc

SEQ ID NO: 288 - DNA, 6555 bp, Artificial Sequence
  Synthetic
gacggatcgggagatctcccgatcccctatggtgcactctcagtacaatctgctctgatgccgcatagttaagccagtatctgctccctgcttgtgtgttggaggtcgctgagtagtgcgcgagcaaaatttaagctacaacaaggcaaggcttgaccgacaattgcatgaagaatctgcttagggttaggcgttttgcgctgcttcgcgatgtacgggccagatatacgcgttgacattgattattgactagttattaatagtaatcaattacggggtcattagttcatagcccatatatggagttccgcgttacataacttacggtaaatggcccgcctggctgaccgcccaacgacccccgcccattgacgtcaataatgacgtatgttcccatagtaacgccaatagggactttccattgacgtcaatgggtggagtatttacggtaaactgcccacttggcagtacatcaagtgtatcatatgccaagtacgccccctattgacgtcaatgacggtaaatggcccgcctggcattatgcccagtacatgaccttatgggactttcctacttggcagtacatctacgtattagtcatcgctattaccatggtgatgcggttttggcagtacatcaatgggcgtggatagcggtttgactcacggggatttccaagtctccaccccattgacgtcaatgggagtttgttttggcaccaaaatcaacgggactttccaaaatgtcgtaacaactccgccccattgacgcaaatgggcggtaggcgtgtacggtgggaggtctatataagcagagctctctggctaactagagaacccactgcttactggcttatcgaaattaatacgactcactatagggagacccaagctggctagcgtttaaacttaagcttgccaccatgaacgccctgacggaaattcagattgagaagctgagaaacttcagcgattgcatcgtcatgcaccctcagatcaagaccatcttcaacgacttcgacgagctgagactgaaccggaagttccaaagcgaccagcagtgcatgctgctgatcggcgacaccggcgtgggcaaatctcacaccatcaaccactacaagaagagagtgctggccacccagaactacagccggaacaccatgccagtgctggtgtccagaatcagcagaggcaagggcctggacgccacactggtgcagatgctggctgatctggaactgttcggcagctctcagatcaaaaagcggggatataagacagacctgaccaagaaactggtggaaagcctgatcaaggcccaggtggaactgctgatcatcaacgagttccaggagctgattgagttcaagagcgtgcaagagcggcaacagatcgctaatggactgaaatttatcagcgaggaagccaaggtgcccatcgtgctggtcggcatgccttgggctgctaagatcgccgaggaaccccagtgggccagcagactggtgcggaagaggaaactggagtacttcagcctgaaaaatgacagcaagtactttagacagtacctgatgggcctggccaaaaaaatgcccttcgatgtgccacctaagctggagtccaagaacacaaccatcgccttgtttgccgcatgcagaggcgagaacagagccctgaagcatctgctgctcgaagccctcaagctggccctttcttgtaatgagtacctggaaaacaagcatttcatcaccgcctacgacaagttcgacttcttcaacgataaggaaaagctgaagtccaagaatccttttaagcaggacatcaaggacatcgagatctacgaggtgatcaagaacagcagctacaaccctaacgccctggaccctgaggacatgctgacagatagagttttcgccatcgtgaagggctccggcaagcggactgctgatggcagtgaatttgagtccccaaagaagaagagaaaggtggggagcggcaaaagaaccgccgacggcagcgaattcgagtcacccaagaagaagaggaaagtcggctccggaaaacggacagccgacggaagcgagttcgagtcaccgaaaaagaagcgaaaagtttaattctagagggcccgtttaaacccgctgatcagcctcgactgtgccttctagttgccagccatctgttgtttgcccctcccccgtgccttccttgaccctggaaggtgccactcccactgtcctttcctaataaaatgaggaaattgcatcgcattgtctgagtaggtgtcattctattctggggggtggggtggggcaggacagcaagggggaggattgggaagacaatagcaggcatgctggggatgcggtgggctctatggcttctgaggcggaaagaaccagctggggctctagggggtatccccacgcgccctgtagcggcgcattaagcgcggcgggtgtggtggttacgcgcagcgtgaccgctacacttgccagcgccctagcgcccgctcctttcgctttcttcccttcctttctcgccacgttcgccggctttccccgtcaagctctaaatcgggggctccctttagggttccgatttagtgctttacggcacctcgaccccaaaaaacttgattagggtgatggttcacgtagtgggccatcgccctgatagacggtttttcgccctttgacgttggagtccacgttctttaatagtggactcttgttccaaactggaacaacactcaaccctatctcggtctattcttttgatttataagggattttgccgatttcggcctattggttaaaaaatgagctgatttaacaaaaatttaacgcgaattaattctgtggaatgtgtgtcagttagggtgtggaaagtccccaggctccccagcaggcagaagtatgcaaagcatgcatctcaattagtcagcaaccaggtgtggaaagtccccaggctccccagcaggcagaagtatgcaaagcatgcatctcaattagtcagcaaccatagtcccgcccctaactccgcccatcccgcccctaactccgcccagttccgcccattctccgccccatggctgactaattttttttatttatgcagaggccgaggccgcctctgcctctgagctattccagaagtagtgaggaggcttttttggaggcctaggcttttgcaaaaagctcccgggagcttgtatatccattttcggatctgatcaagagacaggatgaggatcgtttcgcatgattgaacaagatggattgcacgcaggttctccggccgcttgggtggagaggctattcggctatgactgggcacaacagacaatcggctgctctgatgccgccgtgttccggctgtcagcgcaggggcgcccggttctttttgtcaagaccgacctgtccggtgccctgaatgaactgcaggacgaggcagcgcggctatcgtggctggccacgacgggcgttccttgcgcagctgtgctcgacgttgtcactgaagcgggaagggactggctgctattgggcgaagtgccggggcaggatctcctgtcatctcaccttgctcctgccgagaaagtatccatcatggctgatgcaatgcggcggctgcatacgcttgatccggctacctgcccattcgaccaccaagcgaaacatcgcatcgagcgagcacgtactcggatggaagccggtcttgtcgatcaggatgatctggacgaagagcatcaggggctcgcgccagccgaactgttcgccaggctcaaggcgcgcatgcccgacggcgaggatctcgtcgtgacccatggcgatgcctgcttgccgaatatcatggtggaaaatggccgcttttctggattcatcgactgtggccggctgggtgtggcggaccgctatcaggacatagcgttggctacccgtgatattgctgaagagcttggcggcgaatgggctgaccgcttcctcgtgctttacggtatcgccgctcccgattcgcagcgcatcgccttctatcgccttcttgacgagttcttctgagcgggactctggggttcgaaatgaccgaccaagcgacgcccaacctgccatcacgagatttcgattccaccgccgccttctatgaaaggttgggcttcggaatcgttttccgggacgccggctggatgatcctccagcgcggggatctcatgctggagttcttcgcccaccccaacttgtttattgcagcttataatggttacaaataaagcaatagcatcacaaatttcacaaataaagcatttttttcactgcattctagttgtggtttgtccaaactcatcaatgtatcttatcatgtctgtataccgtcgacctctagctagagcttggcgtaatcatggtcatagctgtttcctgtgtgaaattgttatccgctcacaattccacacaacatacgagccggaagcataaagtgtaaagcctggggtgcctaatgagtgagctaactcacattaattgcgttgcgctcactgcccgctttccagtcgggaaacctgtcgtgccagctgcattaatgaatcggccaacgcgcggggagaggcggtttgcgtattgggcgctcttccgcttcctcgctcactgactcgctgcgctcggtcgttcggctgcggcgagcggtatcagctcactcaaaggcggtaatacggttatccacagaatcaggggataacgcaggaaagaacatgtgagcaaaaggccagcaaaaggccaggaaccgtaaaaaggccgcgttgctggcgtttttccataggctccgcccccctgacgagcatcacaaaaatcgacgctcaagtcagaggtggcgaaacccgacaggactataaagataccaggcgtttccccctggaagctccctcgtgcgctctcctgttccgaccctgccgcttaccggatacctgtccgcctttctcccttcgggaagcgtggcgctttctcatagctcacgctgtaggtatctcagttcggtgtaggtcgttcgctccaagctgggctgtgtgcacgaaccccccgttcagcccgaccgctgcgccttatccggtaactatcgtcttgagtccaacccggtaagacacgacttatcgccactggcagcagccactggtaacaggattagcagagcgaggtatgtaggcggtgctacagagttcttgaagtggtggcctaactacggctacactagaagaacagtatttggtatctgcgctctgctgaagccagttaccttcggaaaaagagttggtagctcttgatccggcaaacaaaccaccgctggtagcggtggtttttttgtttgcaagcagcagattacgcgcagaaaaaaaggatctcaagaagatcctttgatcttttctacggggtctgacgctcagtggaacgaaaactcacgttaagggattttggtcatgagattatcaaaaaggatcttcacctagatccttttaaattaaaaatgaagttttaaatcaatctaaagtatatatgagtaaacttggtctgacagttaccaatgcttaatcagtgaggcacctatctcagcgatctgtctatttcgttcatccatagttgcctgactccccgtcgtgtagataactacgatacgggagggcttaccatctggccccagtgctgcaatgataccgcgagacccacgctcaccggctccagatttatcagcaataaaccagccagccggaagggccgagcgcagaagtggtcctgcaactttatccgcctccatccagtctattaattgttgccgggaagctagagtaagtagttcgccagttaatagtttgcgcaacgttgttgccattgctacaggcatcgtggtgtcacgctcgtcgtttggtatggcttcattcagctccggttcccaacgatcaaggcgagttacatgatcccccatgttgtgcaaaaaagcggttagctccttcggtcctccgatcgttgtcagaagtaagttggccgcagtgttatcactcatggttatggcagcactgcataattctcttactgtcatgccatccgtaagatgcttttctgtgactggtgagtactcaaccaagtcattctgagaatagtgtatgcggcgaccgagttgctcttgcccggcgtcaatacgggataataccgcgccacatagcagaactttaaaagtgctcatcattggaaaacgttcttcggggcgaaaactctcaaggatcttaccgctgttgagatccagttcgatgtaacccactcgtgcacccaactgatcttcagcatcttttactttcaccagcgtttctgggtgagcaaaaacaggaaggcaaaatgccgcaaaaaagggaataagggcgacacggaaatgttgaatactcatactcttcctttttcaatattattgaagcatttatcagggttattgtctcatgagcggatacatatttgaatgtatttagaaaaataaacaaataggggttccgcgcacatttccccgaaaagtgccacctgacgtc

SEQ ID NO: 289 - DNA, 7839 bp, Artificial Sequence
  Synthetic
gacggatcgggagatctcccgatcccctatggtgcactctcagtacaatctgctctgatgccgcatagttaagccagtatctgctccctgcttgtgtgttggaggtcgctgagtagtgcgcgagcaaaatttaagctacaacaaggcaaggcttgaccgacaattgcatgaagaatctgcttagggttaggcgttttgcgctgcttcgcgatgtacgggccagatatacgcgttgacattgattattgactagttattaatagtaatcaattacggggtcattagttcatagcccatatatggagttccgcgttacataacttacggtaaatggcccgcctggctgaccgcccaacgacccccgcccattgacgtcaataatgacgtatgttcccatagtaacgccaatagggactttccattgacgtcaatgggtggagtatttacggtaaactgcccacttggcagtacatcaagtgtatcatatgccaagtacgccccctattgacgtcaatgacggtaaatggcccgcctggcattatgcccagtacatgaccttatgggactttcctacttggcagtacatctacgtattagtcatcgctattaccatggtgatgcggttttggcagtacatcaatgggcgtggatagcggtttgactcacggggatttccaagtctccaccccattgacgtcaatgggagtttgttttggcaccaaaatcaacgggactttccaaaatgtcgtaacaactccgccccattgacgcaaatgggcggtaggcgtgtacggtgggaggtctatataagcagagctctctggctaactagagaacccactgcttactggcttatcgaaattaatacgactcactatagggagacccaagctggctagcgtttaaacttaagcttgccaccatgtgcgagagcagcctggagttcgacgcttgctttcaccacgagtacaacgacagcatcgaatcttttggcagccaacctgagggcttcaagtacgagttcatgggaaaaagcctgccttacacccctgatgccctgatcctgtacacaaacaagacacagaaataccacgaatataagccctacagcaagatcgccagccctctgttccgggccaagttcgccgctaaaagagatgcctctctcaagatgggcatcgacctggtcctggtgaccgacagacagatccgggtggaccccatcctgtctaatctgaagctgctgcacagatactccggcgtgtacggcatcagctccatccagaacgatctgctgagcttcatcagaacaagcggcgccatcaagctgaatgatgtgtccagccagatcggcattcctatcggcgaaaccagaagcctggtgctgggcctgatgcataagcggctgatcgaggccgagctgggatgtgacgacctgaacaacaaccccaccctgtggaccaccccaggcagcggctccggaaaacggacagccgacggaagcgagttcgagtcaccaaagaagaagcggaaagtcggatccggctctggaggcatgaccgacttcttcaatgagttcgatgaaagccttgcccctctgaagcctcagacacctacacaatacgtgaaactggacgacgccaatctgatcaagcgggacctggataccttttctgatacattcaagaaccaggctctgcaaagatacaagctgatcagcagcatcgataagaagctgagccggggctggacacagagaaacctggaccccatcctggatgaactgttcaaagcctccgatgaagtgcggcccaactggcggacagtggctcggtggcggaagaaatacatcgagtctaatggcgacatcgccagcctggctgacaagaaccacaagatgggcaacagaaccaaccgaatcaagggcgacgacaagttcttcgacaaggctctggagaggtttctggacgccaagcggcctacaatcgccactgcctaccagtactacaaagacctgatcgtgatcgagaacgagagcatcgtcgagggcaatatcccgatcatcagctataacgccttcaacaagcggattaaagccatccctccatacgccgtggccgtggccagacacggcaaattcaaagccgatcagtggttcgcctattgcgccgcccatgtgcccccaacccggattctggagcgggtggaaatcgaccatacccctctggacctgatcctcctggacgacgagctgctgatcccaatcggcagaccttacctgacactgctgatcgacgtgttcagcggctgcgtgctgggatttcacctgagttataagtcccctagctacgtgtctgccgccaaggccatcacccacgccatcaagcccaagagcatcgccgctatgaacatcgagctgcagaacaactggccttgtttcgggaagttcgagaacctggtggtggataatggcgccgagttctggtccaagaacctggaacacgcctgccagtcagctggaatcaacatccagtacaaccctgtgcggaagccctggctgaaaccattcatcgaaagattctttggagttatcaacgaatacttcctgcctgagctgcctggcaagaccttcagcaacatcctggaaaaggaagagtacaagcctgagaaggatgccatcatgcgcttcagcaccttcgtggaggagttccacagatggatcgtggacgtctaccaccaggacagcaacagcagagaaaccagaatccctatcaagcggtggcagcagggctttgatgcctatcctcccctgaccatgagcgaggacgacgaagctagatttgacatgctgatgagaatcagcgatagcagaaccctgaccagaaacggcttcaagtaccaggagctgatgtacgactctaccgctctggccgactacagaaagcactacccccaaacaaaggagacagtcaagaagctgattaaagtggaccccgacgacatctctaagatctacgtgtacctggaagagttggaaagctacctggaagtaccttgcaccgatccttctggctacacagatggcctgagcatctacgagcacaaaacaatcaagaaaatcaatagagagatgatcagagagagcaaggacagcctgggcctggccaaggccaggatggccatccacgagagagtgaagcaggagcaggaggcctttaccgccagcaagaccaaggcaaagatcaccaccgtgaaaaaacaggcccagatcgccgacgtgtccaacaccggcaccggaaccatcaaggtgtccgaggaaagcgccgctcctgtgcagaagcacattagcaacgacaacagcgacgactgggacgatgatctggaggccttcgagtgattctagagggcccgtttaaacccgctgatcagcctcgactgtgccttctagttgccagccatctgttgtttgcccctcccccgtgccttccttgaccctggaaggtgccactcccactgtcctttcctaataaaatgaggaaattgcatcgcattgtctgagtaggtgtcattctattctggggggtggggtggggcaggacagcaagggggaggattgggaagacaatagcaggcatgctggggatgcggtgggctctatggcttctgaggcggaaagaaccagctggggctctagggggtatccccacgcgccctgtagcggcgcattaagcgcggcgggtgtggtggttacgcgcagcgtgaccgctacacttgccagcgccctagcgcccgctcctttcgctttcttcccttcctttctcgccacgttcgccggctttccccgtcaagctctaaatcgggggctccctttagggttccgatttagtgctttacggcacctcgaccccaaaaaacttgattagggtgatggttcacgtagtgggccatcgccctgatagacggtttttcgccctttgacgttggagtccacgttctttaatagtggactcttgttccaaactggaacaacactcaaccctatctcggtctattcttttgatttataagggattttgccgatttcggcctattggttaaaaaatgagctgatttaacaaaaatttaacgcgaattaattctgtggaatgtgtgtcagttagggtgtggaaagtccccaggctccccagcaggcagaagtatgcaaagcatgcatctcaattagtcagcaaccaggtgtggaaagtccccaggctccccagcaggcagaagtatgcaaagcatgcatctcaattagtcagcaaccatagtcccgcccctaactccgcccatcccgcccctaactccgcccagttccgcccattctccgccccatggctgactaattttttttatttatgcagaggccgaggccgcctctgcctctgagctattccagaagtagtgaggaggcttttttggaggcctaggcttttgcaaaaagctcccgggagcttgtatatccattttcggatctgatcaagagacaggatgaggatcgtttcgcatgattgaacaagatggattgcacgcaggttctccggccgcttgggtggagaggctattcggctatgactgggcacaacagacaatcggctgctctgatgccgccgtgttccggctgtcagcgcaggggcgcccggttctttttgtcaagaccgacctgtccggtgccctgaatgaactgcaggacgaggcagcgcggctatcgtggctggccacgacgggcgttccttgcgcagctgtgctcgacgttgtcactgaagcgggaagggactggctgctattgggcgaagtgccggggcaggatctcctgtcatctcaccttgctcctgccgagaaagtatccatcatggctgatgcaatgcggcggctgcatacgcttgatccggctacctgcccattcgaccaccaagcgaaacatcgcatcgagcgagcacgtactcggatggaagccggtcttgtcgatcaggatgatctggacgaagagcatcaggggctcgcgccagccgaactgttcgccaggctcaaggcgcgcatgcccgacggcgaggatctcgtcgtgacccatggcgatgcctgcttgccgaatatcatggtggaaaatggccgcttttctggattcatcgactgtggccggctgggtgtggcggaccgctatcaggacatagcgttggctacccgtgatattgctgaagagcttggcggcgaatgggctgaccgcttcctcgtgctttacggtatcgccgctcccgattcgcagcgcatcgccttctatcgccttcttgacgagttcttctgagcgggactctggggttcgaaatgaccgaccaagcgacgcccaacctgccatcacgagatttcgattccaccgccgccttctatgaaaggttgggcttcggaatcgttttccgggacgccggctggatgatcctccagcgcggggatctcatgctggagttcttcgcccaccccaacttgtttattgcagcttataatggttacaaataaagcaatagcatcacaaatttcacaaataaagcatttttttcactgcattctagttgtggtttgtccaaactcatcaatgtatcttatcatgtctgtataccgtcgacctctagctagagcttggcgtaatcatggtcatagctgtttcctgtgtgaaattgttatccgctcacaattccacacaacatacgagccggaagcataaagtgtaaagcctggggtgcctaatgagtgagctaactcacattaattgcgttgcgctcactgcccgctttccagtcgggaaacctgtcgtgccagctgcattaatgaatcggccaacgcgcggggagaggcggtttgcgtattgggcgctcttccgcttcctcgctcactgactcgctgcgctcggtcgttcggctgcggcgagcggtatcagctcactcaaaggcggtaatacggttatccacagaatcaggggataacgcaggaaagaacatgtgagcaaaaggccagcaaaaggccaggaaccgtaaaaaggccgcgttgctggcgtttttccataggctccgcccccctgacgagcatcacaaaaatcgacgctcaagtcagaggtggcgaaacccgacaggactataaagataccaggcgtttccccctggaagctccctcgtgcgctctcctgttccgaccctgccgcttaccggatacctgtccgcctttctcccttcgggaagcgtggcgctttctcatagctcacgctgtaggtatctcagttcggtgtaggtcgttcgctccaagctgggctgtgtgcacgaaccccccgttcagcccgaccgctgcgccttatccggtaactatcgtcttgagtccaacccggtaagacacgacttatcgccactggcagcagccactggtaacaggattagcagagcgaggtatgtaggcggtgctacagagttcttgaagtggtggcctaactacggctacactagaagaacagtatttggtatctgcgctctgctgaagccagttaccttcggaaaaagagttggtagctcttgatccggcaaacaaaccaccgctggtagcggtggtttttttgtttgcaagcagcagattacgcgcagaaaaaaaggatctcaagaagatcctttgatcttttctacggggtctgacgctcagtggaacgaaaactcacgttaagggattttggtcatgagattatcaaaaaggatcttcacctagatccttttaaattaaaaatgaagttttaaatcaatctaaagtatatatgagtaaacttggtctgacagttaccaatgcttaatcagtgaggcacctatctcagcgatctgtctatttcgttcatccatagttgcctgactccccgtcgtgtagataactacgatacgggagggcttaccatctggccccagtgctgcaatgataccgcgagacccacgctcaccggctccagatttatcagcaataaaccagccagccggaagggccgagcgcagaagtggtcctgcaactttatccgcctccatccagtctattaattgttgccgggaagctagagtaagtagttcgccagttaatagtttgcgcaacgttgttgccattgctacaggcatcgtggtgtcacgctcgtcgtttggtatggcttcattcagctccggttcccaacgatcaaggcgagttacatgatcccccatgttgtgcaaaaaagcggttagctccttcggtcctccgatcgttgtcagaagtaagttggccgcagtgttatcactcatggttatggcagcactgcataattctcttactgtcatgccatccgtaagatgcttttctgtgactggtgagtactcaaccaagtcattctgagaatagtgtatgcggcgaccgagttgctcttgcccggcgtcaatacgggataataccgcgccacatagcagaactttaaaagtgctcatcattggaaaacgttcttcggggcgaaaactctcaaggatcttaccgctgttgagatccagttcgatgtaacccactcgtgcacccaactgatcttcagcatcttttactttcaccagcgtttctgggtgagcaaaaacaggaaggcaaaatgccgcaaaaaagggaataagggcgacacggaaatgttgaatactcatactcttcctttttcaatattattgaagcatttatcagggttattgtctcatgagcggatacatatttgaatgtatttagaaaaataaacaaataggggttccgcgcacatttccccgaaaagtgccacctgacgtc

SEQ ID NO: 290 - DNA, 6555 bp, Artificial Sequence
  Synthetic
gacggatcgggagatctcccgatcccctatggtgcactctcagtacaatctgctctgatgccgcatagttaagccagtatctgctccctgcttgtgtgttggaggtcgctgagtagtgcgcgagcaaaatttaagctacaacaaggcaaggcttgaccgacaattgcatgaagaatctgcttagggttaggcgttttgcgctgcttcgcgatgtacgggccagatatacgcgttgacattgattattgactagttattaatagtaatcaattacggggtcattagttcatagcccatatatggagttccgcgttacataacttacggtaaatggcccgcctggctgaccgcccaacgacccccgcccattgacgtcaataatgacgtatgttcccatagtaacgccaatagggactttccattgacgtcaatgggtggagtatttacggtaaactgcccacttggcagtacatcaagtgtatcatatgccaagtacgccccctattgacgtcaatgacggtaaatggcccgcctggcattatgcccagtacatgaccttatgggactttcctacttggcagtacatctacgtattagtcatcgctattaccatggtgatgcggttttggcagtacatcaatgggcgtggatagcggtttgactcacggggatttccaagtctccaccccattgacgtcaatgggagtttgttttggcaccaaaatcaacgggactttccaaaatgtcgtaacaactccgccccattgacgcaaatgggcggtaggcgtgtacggtgggaggtctatataagcagagctctctggctaactagagaacccactgcttactggcttatcgaaattaatacgactcactatagggagacccaagctggctagcgtttaaacttaagcttgccaccatgaacgccctgaccgagatccagatcgagaagctgagaaatttctccgactgcatcgtgatgcaccctcagattaagaccatcttcaacgatttcgacgaactgcggctgaacagaaagtttcagtctgatcagcagtgcatgctgctcatcggcgacaccggagtgggcaagtcccacacaatcaaccactacaagaagcgggtgcttgctacacagaactacagcagaaacaccatgccagtgctggtgtccagaatcagccggggaaagggcctggacgctacactggtccagatgttggctgatctggagctgttcggcagcagccagatcaaaaagagaggctacaaaaccgacctgaccaagaaactggtggaatctctgatcaaggcccaggtggaactgctgatcatcaacgagttccaagagctgattgagtttaaatctgtgcaggagagacaacaaatcgccaacggcctgaagttcatctctgaagaagccaaggtgcctatcgtgctggtcggcatgccttgggccgccaagatcgccgaggaaccccagtgggccagcagactggtgcggaagcgcaagctggaatacttcagcctgaagaatgacatcaagtacttcagacagtacctgatgggcctggccaaacagatgccctttgataagcctcctaagctggaaagcaagcacaccacaatggccctgtttgctgcttgtagaggagagaatcgggccctgaagcatctgctgagcgaggccctgaagctggccctcagctgcaacgagcacctggaaaacaagcatttcataacagcctacgagaagttcgacttcttcaatgacaaagacagcctgaaactgaaaaacccattcgagcaggacatcaaggacatcgtgatctacgaggtgatcaagagcagctcttataaccccaacgccctggaccctgaggacatgctgacaggcagaaagttcgccatcgttaagggctccggcaagcggactgctgatggcagtgaatttgagtccccaaagaagaagagaaaggtggggagcggcaaaagaaccgccgacggcagcgaattcgagtcacccaagaagaagaggaaagtcggctccggaaaacggacagccgacggaagcgagttcgagtcaccgaaaaagaagcgaaaagtttaattctagagggcccgtttaaacccgctgatcagcctcgactgtgccttctagttgccagccatctgttgtttgcccctcccccgtgccttccttgaccctggaaggtgccactcccactgtcctttcctaataaaatgaggaaattgcatcgcattgtctgagtaggtgtcattctattctggggggtggggtggggcaggacagcaagggggaggattgggaagacaatagcaggcatgctggggatgcggtgggctctatggcttctgaggcggaaagaaccagctggggctctagggggtatccccacgcgccctgtagcggcgcattaagcgcggcgggtgtggtggttacgcgcagcgtgaccgctacacttgccagcgccctagcgcccgctcctttcgctttcttcccttcctttctcgccacgttcgccggctttccccgtcaagctctaaatcgggggctccctttagggttccgatttagtgctttacggcacctcgaccccaaaaaacttgattagggtgatggttcacgtagtgggccatcgccctgatagacggtttttcgccctttgacgttggagtccacgttctttaatagtggactcttgttccaaactggaacaacactcaaccctatctcggtctattcttttgatttataagggattttgccgatttcggcctattggttaaaaaatgagctgatttaacaaaaatttaacgcgaattaattctgtggaatgtgtgtcagttagggtgtggaaagtccccaggctccccagcaggcagaagtatgcaaagcatgcatctcaattagtcagcaaccaggtgtggaaagtccccaggctccccagcaggcagaagtatgcaaagcatgcatctcaattagtcagcaaccatagtcccgcccctaactccgcccatcccgcccctaactccgcccagttccgcccattctccgccccatggctgactaattttttttatttatgcagaggccgaggccgcctctgcctctgagctattccagaagtagtgaggaggcttttttggaggcctaggcttttgcaaaaagctcccgggagcttgtatatccattttcggatctgatcaagagacaggatgaggatcgtttcgcatgattgaacaagatggattgcacgcaggttctccggccgcttgggtggagaggctattcggctatgactgggcacaacagacaatcggctgctctgatgccgccgtgttccggctgtcagcgcaggggcgcccggttctttttgtcaagaccgacctgtccggtgccctgaatgaactgcaggacgaggcagcgcggctatcgtggctggccacgacgggcgttccttgcgcagctgtgctcgacgttgtcactgaagcgggaagggactggctgctattgggcgaagtgccggggcaggatctcctgtcatctcaccttgctcctgccgagaaagtatccatcatggctgatgcaatgcggcggctgcatacgcttgatccggctacctgcccattcgaccaccaagcgaaacatcgcatcgagcgagcacgtactcggatggaagccggtcttgtcgatcaggatgatctggacgaagagcatcaggggctcgcgccagccgaactgttcgccaggctcaaggcgcgcatgcccgacggcgaggatctcgtcgtgacccatggcgatgcctgcttgccgaatatcatggtggaaaatggccgcttttctggattcatcgactgtggccggctgggtgtggcggaccgctatcaggacatagcgttggctacccgtgatattgctgaagagcttggcggcgaatgggctgaccgcttcctcgtgctttacggtatcgccgctcccgattcgcagcgcatcgccttctatcgccttcttgacgagttcttctgagcgggactctggggttcgaaatgaccgaccaagcgacgcccaacctgccatcacgagatttcgattccaccgccgccttctatgaaaggttgggcttcggaatcgttttccgggacgccggctggatgatcctccagcgcggggatctcatgctggagttcttcgcccaccccaacttgtttattgcagcttataatggttacaaataaagcaatagcatcacaaatttcacaaataaagcatttttttcactgcattctagttgtggtttgtccaaactcatcaatgtatcttatcatgtctgtataccgtcgacctctagctagagcttggcgtaatcatggtcatagctgtttcctgtgtgaaattgttatccgctcacaattccacacaacatacgagccggaagcataaagtgtaaagcctggggtgcctaatgagtgagctaactcacattaattgcgttgcgctcactgcccgctttccagtcgggaaacctgtcgtgccagctgcattaatgaatcggccaacgcgcggggagaggcggtttgcgtattgggcgctcttccgcttcctcgctcactgactcgctgcgctcggtcgttcggctgcggcgagcggtatcagctcactcaaaggcggtaatacggttatccacagaatcaggggataacgcaggaaagaacatgtgagcaaaaggccagcaaaaggccaggaaccgtaaaaaggccgcgttgctggcgtttttccataggctccgcccccctgacgagcatcacaaaaatcgacgctcaagtcagaggtggcgaaacccgacaggactataaagataccaggcgtttccccctggaagctccctcgtgcgctctcctgttccgaccctgccgcttaccggatacctgtccgcctttctcccttcgggaagcgtggcgctttctcatagctcacgctgtaggtatctcagttcggtgtaggtcgttcgctccaagctgggctgtgtgcacgaaccccccgttcagcccgaccgctgcgccttatccggtaactatcgtcttgagtccaacccggtaagacacgacttatcgccactggcagcagccactggtaacaggattagcagagcgaggtatgtaggcggtgctacagagttcttgaagtggtggcctaactacggctacactagaagaacagtatttggtatctgcgctctgctgaagccagttaccttcggaaaaagagttggtagctcttgatccggcaaacaaaccaccgctggtagcggtggtttttttgtttgcaagcagcagattacgcgcagaaaaaaaggatctcaagaagatcctttgatcttttctacggggtctgacgctcagtggaacgaaaactcacgttaagggattttggtcatgagattatcaaaaaggatcttcacctagatccttttaaattaaaaatgaagttttaaatcaatctaaagtatatatgagtaaacttggtctgacagttaccaatgcttaatcagtgaggcacctatctcagcgatctgtctatttcgttcatccatagttgcctgactccccgtcgtgtagataactacgatacgggagggcttaccatctggccccagtgctgcaatgataccgcgagacccacgctcaccggctccagatttatcagcaataaaccagccagccggaagggccgagcgcagaagtggtcctgcaactttatccgcctccatccagtctattaattgttgccgggaagctagagtaagtagttcgccagttaatagtttgcgcaacgttgttgccattgctacaggcatcgtggtgtcacgctcgtcgtttggtatggcttcattcagctccggttcccaacgatcaaggcgagttacatgatcccccatgttgtgcaaaaaagcggttagctccttcggtcctccgatcgttgtcagaagtaagttggccgcagtgttatcactcatggttatggcagcactgcataattctcttactgtcatgccatccgtaagatgcttttctgtgactggtgagtactcaaccaagtcattctgagaatagtgtatgcggcgaccgagttgctcttgcccggcgtcaatacgggataataccgcgccacatagcagaactttaaaagtgctcatcattggaaaacgttcttcggggcgaaaactctcaaggatcttaccgctgttgagatccagttcgatgtaacccactcgtgcacccaactgatcttcagcatcttttactttcaccagcgtttctgggtgagcaaaaacaggaaggcaaaatgccgcaaaaaagggaataagggcgacacggaaatgttgaatactcatactcttcctttttcaatattattgaagcatttatcagggttattgtctcatgagcggatacatatttgaatgtatttagaaaaataaacaaataggggttccgcgcacatttccccgaaaagtgccacctgacgtc

SEQ ID NO: 291 - DNA, 7839 bp, Artificial Sequence
  Synthetic
gacggatcgggagatctcccgatcccctatggtgcactctcagtacaatctgctctgatgccgcatagttaagccagtatctgctccctgcttgtgtgttggaggtcgctgagtagtgcgcgagcaaaatttaagctacaacaaggcaaggcttgaccgacaattgcatgaagaatctgcttagggttaggcgttttgcgctgcttcgcgatgtacgggccagatatacgcgttgacattgattattgactagttattaatagtaatcaattacggggtcattagttcatagcccatatatggagttccgcgttacataacttacggtaaatggcccgcctggctgaccgcccaacgacccccgcccattgacgtcaataatgacgtatgttcccatagtaacgccaatagggactttccattgacgtcaatgggtggagtatttacggtaaactgcccacttggcagtacatcaagtgtatcatatgccaagtacgccccctattgacgtcaatgacggtaaatggcccgcctggcattatgcccagtacatgaccttatgggactttcctacttggcagtacatctacgtattagtcatcgctattaccatggtgatgcggttttggcagtacatcaatgggcgtggatagcggtttgactcacggggatttccaagtctccaccccattgacgtcaatgggagtttgttttggcaccaaaatcaacgggactttccaaaatgtcgtaacaactccgccccattgacgcaaatgggcggtaggcgtgtacggtgggaggtctatataagcagagctctctggctaactagagaacccactgcttactggcttatcgaaattaatacgactcactatagggagacccaagctggctagcgtttaaacttaagcttgccaccatgtgtgaaagcaccctggagttcgacgcctgcttccaccacgagtacaatgatctgatcgagaacttcggatctcaacctgagggatttcagtacgagttcatgggcaagagcctgagctacacacctgatgccctgatcagctataccaacaagacacagaagtaccacgaatacaagccctacagcaaaatcgcctctccactgttccgggccaagttcgccgctaagcgggacgcttctctgaaaatgggcatcgaccttgtgctggtgaccgaccgccagatcagagtgaaccccatcctgagaaacctgaagctgctgcatagatacagcggcgtccacggcgtgtccagcatccagaacgagctgctgtcttttatccacaagtccggcgccatcaagctgaacgacatcagcagccagttcggcctgcctatcggcgaggccagaagcttcctgtacgccctgattcacaaaggcctcctgaaggccgacctggaagatgatgacctgaccaacaatcctacactgtggatcacccctggcagcggctccggaaaacggacagccgacggaagcgagttcgagtcaccaaagaagaagcggaaagtcggatccggctctggaggcatgaccgacttctttgatgagttcgacgagagcctggttccactgaagccacagaccccttctcagtatgtgaagcttgatgatgccaacctggtcaagcgggacctggacacattcacagatgatctcaagaatcaggccctgcagcggtacaagctgattagcttcatcgacaagaaactgtccagaggctggacccagagaaacctggaccctatcctggacgaactgttcaagggccacggagaggtgcggcctagctggagaactgtggccagatggcggaagaagtacatcgagagcaacggcgacatcgcctctctggtggacaagaaacacaagatgggcaaccggaccaagaggatcgaaggcgatgacaaatttttcgacatcgccctggaacggtttctggacgccaaaagacctacagtggccaccgcctaccagtactacaaggacctcattatcatcgagaacgagaatatcgtggaaggcaaagtgcctatcatgagctacaccgccttcaacaacagaataaaggccatccctccttacgccgtggccgtggccagacacggcaagttcaaggctgatcagtggttcgcccattgtgccgcccacgtacctccaacaagaatcctggaaagagtggaaatcgaccacacccctctggacctgattctgctggacgatgagctgctgatccctatcggcagaccctacctgactctgctgattgacgtgttcagcggctgcgtgctgggcttccacctgagctacaagagccctagctatgtgtccgctgctaaggccatcacccacgccatcaaggcaaagaagctggacgacctgaacatccaactgcagaacgactggccttgcttcggcaagttcgagaacttggtcgtggacaacggcgccgagttctggtccaagaacctggaacacgcctgccagagcgccggaatcaacatccaatacaaccaggtgcggaagccttggctgaagcccttcatcgagaggttcttcggagtgatcaatgagtacttcctgcccgagctgcctggcaaaaccttcagcaatatcctggagaaagaggaatacaagcctgaaaaggacgccatcatgcggtttagcgcctttgtggaagagttccacagatggatcgttgatgtgtaccaccaggacagcaattccagagagacaagaatccccatcaagcaatggcagcagggctataacgtgtacccccccctgacaatgaacgaggaagatgaggccagatttaccatgctgatgagaatcagcgacagccggaccctgtccagaaacggcatcaagttccaggagctgatgtacgacagcaccgccctggctgactacagaaagcactaccctcagaccaaggaaacaatcaaaaagctgatcaaggtggaccctgatgacatcagcaagatctacgtgtacctggaggagctggaaagctacctggaagtgccctgcaccgaccccacaggctacgccgatggcctgtctatctacgagcataagatcatcaaaaaggtgaacagagaaaccatccgggaatctaaatctagcctgggactggccaaggcccgcatggccatccacgagagagtgaagcaggagcaagaggctttcatcgccagcaagacaaaggctaaaatcaccagcgtgaagaagcaggcccagatcgccgatgtctctaataccggcaaaggaacaatcaaggtgtctgatgagaacgaggccagcgagcagaagaaaatctccaacaacaccttcgatgactgggacgacgacctggaagcttttgagtgattctagagggcccgtttaaacccgctgatcagcctcgactgtgccttctagttgccagccatctgttgtttgcccctcccccgtgccttccttgaccctggaaggtgccactcccactgtcctttcctaataaaatgaggaaattgcatcgcattgtctgagtaggtgtcattctattctggggggtggggtggggcaggacagcaagggggaggattgggaagacaatagcaggcatgctggggatgcggtgggctctatggcttctgaggcggaaagaaccagctggggctctagggggtatccccacgcgccctgtagcggcgcattaagcgcggcgggtgtggtggttacgcgcagcgtgaccgctacacttgccagcgccctagcgcccgctcctttcgctttcttcccttcctttctcgccacgttcgccggctttccccgtcaagctctaaatcgggggctccctttagggttccgatttagtgctttacggcacctcgaccccaaaaaacttgattagggtgatggttcacgtagtgggccatcgccctgatagacggtttttcgccctttgacgttggagtccacgttctttaatagtggactcttgttccaaactggaacaacactcaaccctatctcggtctattcttttgatttataagggattttgccgatttcggcctattggttaaaaaatgagctgatttaacaaaaatttaacgcgaattaattctgtggaatgtgtgtcagttagggtgtggaaagtccccaggctccccagcaggcagaagtatgcaaagcatgcatctcaattagtcagcaaccaggtgtggaaagtccccaggctccccagcaggcagaagtatgcaaagcatgcatctcaattagtcagcaaccatagtcccgcccctaactccgcccatcccgcccctaactccgcccagttccgcccattctccgccccatggctgactaattttttttatttatgcagaggccgaggccgcctctgcctctgagctattccagaagtagtgaggaggcttttttggaggcctaggcttttgcaaaaagctcccgggagcttgtatatccattttcggatctgatcaagagacaggatgaggatcgtttcgcatgattgaacaagatggattgcacgcaggttctccggccgcttgggtggagaggctattcggctatgactgggcacaacagacaatcggctgctctgatgccgccgtgttccggctgtcagcgcaggggcgcccggttctttttgtcaagaccgacctgtccggtgccctgaatgaactgcaggacgaggcagcgcggctatcgtggctggccacgacgggcgttccttgcgcagctgtgctcgacgttgtcactgaagcgggaagggactggctgctattgggcgaagtgccggggcaggatctcctgtcatctcaccttgctcctgccgagaaagtatccatcatggctgatgcaatgcggcggctgcatacgcttgatccggctacctgcccattcgaccaccaagcgaaacatcgcatcgagcgagcacgtactcggatggaagccggtcttgtcgatcaggatgatctggacgaagagcatcaggggctcgcgccagccgaactgttcgccaggctcaaggcgcgcatgcccgacggcgaggatctcgtcgtgacccatggcgatgcctgcttgccgaatatcatggtggaaaatggccgcttttctggattcatcgactgtggccggctgggtgtggcggaccgctatcaggacatagcgttggctacccgtgatattgctgaagagcttggcggcgaatgggctgaccgcttcctcgtgctttacggtatcgccgctcccgattcgcagcgcatcgccttctatcgccttcttgacgagttcttctgagcgggactctggggttcgaaatgaccgaccaagcgacgcccaacctgccatcacgagatttcgattccaccgccgccttctatgaaaggttgggcttcggaatcgttttccgggacgccggctggatgatcctccagcgcggggatctcatgctggagttcttcgcccaccccaacttgtttattgcagcttataatggttacaaataaagcaatagcatcacaaatttcacaaataaagcatttttttcactgcattctagttgtggtttgtccaaactcatcaatgtatcttatcatgtctgtataccgtcgacctctagctagagcttggcgtaatcatggtcatagctgtttcctgtgtgaaattgttatccgctcacaattccacacaacatacgagccggaagcataaagtgtaaagcctggggtgcctaatgagtgagctaactcacattaattgcgttgcgctcactgcccgctttccagtcgggaaacctgtcgtgccagctgcattaatgaatcggccaacgcgcggggagaggcggtttgcgtattgggcgctcttccgcttcctcgctcactgactcgctgcgctcggtcgttcggctgcggcgagcggtatcagctcactcaaaggcggtaatacggttatccacagaatcaggggataacgcaggaaagaacatgtgagcaaaaggccagcaaaaggccaggaaccgtaaaaaggccgcgttgctggcgtttttccataggctccgcccccctgacgagcatcacaaaaatcgacgctcaagtcagaggtggcgaaacccgacaggactataaagataccaggcgtttccccctggaagctccctcgtgcgctctcctgttccgaccctgccgcttaccggatacctgtccgcctttctcccttcgggaagcgtggcgctttctcatagctcacgctgtaggtatctcagttcggtgtaggtcgttcgctccaagctgggctgtgtgcacgaaccccccgttcagcccgaccgctgcgccttatccggtaactatcgtcttgagtccaacccggtaagacacgacttatcgccactggcagcagccactggtaacaggattagcagagcgaggtatgtaggcggtgctacagagttcttgaagtggtggcctaactacggctacactagaagaacagtatttggtatctgcgctctgctgaagccagttaccttcggaaaaagagttggtagctcttgatccggcaaacaaaccaccgctggtagcggtggtttttttgtttgcaagcagcagattacgcgcagaaaaaaaggatctcaagaagatcctttgatcttttctacggggtctgacgctcagtggaacgaaaactcacgttaagggattttggtcatgagattatcaaaaaggatcttcacctagatccttttaaattaaaaatgaagttttaaatcaatctaaagtatatatgagtaaacttggtctgacagttaccaatgcttaatcagtgaggcacctatctcagcgatctgtctatttcgttcatccatagttgcctgactccccgtcgtgtagataactacgatacgggagggcttaccatctggccccagtgctgcaatgataccgcgagacccacgctcaccggctccagatttatcagcaataaaccagccagccggaagggccgagcgcagaagtggtcctgcaactttatccgcctccatccagtctattaattgttgccgggaagctagagtaagtagttcgccagttaatagtttgcgcaacgttgttgccattgctacaggcatcgtggtgtcacgctcgtcgtttggtatggcttcattcagctccggttcccaacgatcaaggcgagttacatgatcccccatgttgtgcaaaaaagcggttagctccttcggtcctccgatcgttgtcagaagtaagttggccgcagtgttatcactcatggttatggcagcactgcataattctcttactgtcatgccatccgtaagatgcttttctgtgactggtgagtactcaaccaagtcattctgagaatagtgtatgcggcgaccgagttgctcttgcccggcgtcaatacgggataataccgcgccacatagcagaactttaaaagtgctcatcattggaaaacgttcttcggggcgaaaactctcaaggatcttaccgctgttgagatccagttcgatgtaacccactcgtgcacccaactgatcttcagcatcttttactttcaccagcgtttctgggtgagcaaaaacaggaaggcaaaatgccgcaaaaaagggaataagggcgacacggaaatgttgaatactcatactcttcctttttcaatattattgaagcatttatcagggttattgtctcatgagcggatacatatttgaatgtatttagaaaaataaacaaataggggttccgcgcacatttccccgaaaagtgccacctgacgtc

SEQ ID NO: 292 - DNA, 6555 bp, Artificial Sequence
  Synthetic
gacggatcgggagatctcccgatcccctatggtgcactctcagtacaatctgctctgatgccgcatagttaagccagtatctgctccctgcttgtgtgttggaggtcgctgagtagtgcgcgagcaaaatttaagctacaacaaggcaaggcttgaccgacaattgcatgaagaatctgcttagggttaggcgttttgcgctgcttcgcgatgtacgggccagatatacgcgttgacattgattattgactagttattaatagtaatcaattacggggtcattagttcatagcccatatatggagttccgcgttacataacttacggtaaatggcccgcctggctgaccgcccaacgacccccgcccattgacgtcaataatgacgtatgttcccatagtaacgccaatagggactttccattgacgtcaatgggtggagtatttacggtaaactgcccacttggcagtacatcaagtgtatcatatgccaagtacgccccctattgacgtcaatgacggtaaatggcccgcctggcattatgcccagtacatgaccttatgggactttcctacttggcagtacatctacgtattagtcatcgctattaccatggtgatgcggttttggcagtacatcaatgggcgtggatagcggtttgactcacggggatttccaagtctccaccccattgacgtcaatgggagtttgttttggcaccaaaatcaacgggactttccaaaatgtcgtaacaactccgccccattgacgcaaatgggcggtaggcgtgtacggtgggaggtctatataagcagagctctctggctaactagagaacccactgcttactggcttatcgaaattaatacgactcactatagggagacccaagctggctagcgtttaaacttaagcttgccaccatgaacgccctgacagagatccagatcaaccagctgcaaagcttttctgattgcatcgtgatgcacacacagatcaaggccattttcaatgacttcgacgagctgagactaaatagaaagctgcagagcgaccagcaatgtatgctgctggtgggcgacaccggcgtgggaaagagccacaccatcaaccactacaagaagtctgtgctcgccacccagaactacagcagaaatacaatgcctgtgctgatcagcaggatcagccgcggcaagggcctggatgccaccctgatgcagatgctggctgatctggaactgttcggcagctcccagatcaagaagagaggctacaaaaccgacctgaccaagaagctggtcgagagcctgatcaaggcccaggtggaactgctgatcatcaacgagttccaggagctgatcgagttcaagtccatccaggagcggcagcagatcgccaacggcctgaagttcatcagcgaagaagccaaggtgcccatcgtgctggttggcatgccttgggccgctaaaatcgctgaggaacctcagtggtccagccggctggtgcggaaacggaaactggaatatttcagcctgaaagacgactctaagtacttccggcaatacctgatgggtctggctaagaaaatgccctttgacgaacctcctgtgttagaaagaaagcatctggccatcgccctgttcgccgcctgcagaggcgagaatagagccctgaagcacattctgctggaggccctgaagctggcacttagcagaaacgagcacctggagaagaaacacttcatcaccgtgtacgataagttcgattttttcaacgacaaggaactgctggaactgaagaacccctttagacaggacatcgaggacatcaagatctacgaggtgatcaaaaacagcagctacaaccctaacgccctggaccctgagcacatgctgacaggaagaaagttcgccatcgtcaagggctccggcaagcggactgctgatggcagtgaatttgagtccccaaagaagaagagaaaggtggggagcggcaaaagaaccgccgacggcagcgaattcgagtcacccaagaagaagaggaaagtcggctccggaaaacggacagccgacggaagcgagttcgagtcaccgaaaaagaagcgaaaagtttaattctagagggcccgtttaaacccgctgatcagcctcgactgtgccttctagttgccagccatctgttgtttgcccctcccccgtgccttccttgaccctggaaggtgccactcccactgtcctttcctaataaaatgaggaaattgcatcgcattgtctgagtaggtgtcattctattctggggggtggggtggggcaggacagcaagggggaggattgggaagacaatagcaggcatgctggggatgcggtgggctctatggcttctgaggcggaaagaaccagctggggctctagggggtatccccacgcgccctgtagcggcgcattaagcgcggcgggtgtggtggttacgcgcagcgtgaccgctacacttgccagcgccctagcgcccgctcctttcgctttcttcccttcctttctcgccacgttcgccggctttccccgtcaagctctaaatcgggggctccctttagggttccgatttagtgctttacggcacctcgaccccaaaaaacttgattagggtgatggttcacgtagtgggccatcgccctgatagacggtttttcgccctttgacgttggagtccacgttctttaatagtggactcttgttccaaactggaacaacactcaaccctatctcggtctattcttttgatttataagggattttgccgatttcggcctattggttaaaaaatgagctgatttaacaaaaatttaacgcgaattaattctgtggaatgtgtgtcagttagggtgtggaaagtccccaggctccccagcaggcagaagtatgcaaagcatgcatctcaattagtcagcaaccaggtgtggaaagtccccaggctccccagcaggcagaagtatgcaaagcatgcatctcaattagtcagcaaccatagtcccgcccctaactccgcccatcccgcccctaactccgcccagttccgcccattctccgccccatggctgactaattttttttatttatgcagaggccgaggccgcctctgcctctgagctattccagaagtagtgaggaggcttttttggaggcctaggcttttgcaaaaagctcccgggagcttgtatatccattttcggatctgatcaagagacaggatgaggatcgtttcgcatgattgaacaagatggattgcacgcaggttctccggccgcttgggtggagaggctattcggctatgactgggcacaacagacaatcggctgctctgatgccgccgtgttccggctgtcagcgcaggggcgcccggttctttttgtcaagaccgacctgtccggtgccctgaatgaactgcaggacgaggcagcgcggctatcgtggctggccacgacgggcgttccttgcgcagctgtgctcgacgttgtcactgaagcgggaagggactggctgctattgggcgaagtgccggggcaggatctcctgtcatctcaccttgctcctgccgagaaagtatccatcatggctgatgcaatgcggcggctgcatacgcttgatccggctacctgcccattcgaccaccaagcgaaacatcgcatcgagcgagcacgtactcggatggaagccggtcttgtcgatcaggatgatctggacgaagagcatcaggggctcgcgccagccgaactgttcgccaggctcaaggcgcgcatgcccgacggcgaggatctcgtcgtgacccatggcgatgcctgcttgccgaatatcatggtggaaaatggccgcttttctggattcatcgactgtggccggctgggtgtggcggaccgctatcaggacatagcgttggctacccgtgatattgctgaagagcttggcggcgaatgggctgaccgcttcctcgtgctttacggtatcgccgctcccgattcgcagcgcatcgccttctatcgccttcttgacgagttcttctgagcgggactctggggttcgaaatgaccgaccaagcgacgcccaacctgccatcacgagatttcgattccaccgccgccttctatgaaaggttgggcttcggaatcgttttccgggacgccggctggatgatcctccagcgcggggatctcatgctggagttcttcgcccaccccaacttgtttattgcagcttataatggttacaaataaagcaatagcatcacaaatttcacaaataaagcatttttttcactgcattctagttgtggtttgtccaaactcatcaatgtatcttatcatgtctgtataccgtcgacctctagctagagcttggcgtaatcatggtcatagctgtttcctgtgtgaaattgttatccgctcacaattccacacaacatacgagccggaagcataaagtgtaaagcctggggtgcctaatgagtgagctaactcacattaattgcgttgcgctcactgcccgctttccagtcgggaaacctgtcgtgccagctgcattaatgaatcggccaacgcgcggggagaggcggtttgcgtattgggcgctcttccgcttcctcgctcactgactcgctgcgctcggtcgttcggctgcggcgagcggtatcagctcactcaaaggcggtaatacggttatccacagaatcaggggataacgcaggaaagaacatgtgagcaaaaggccagcaaaaggccaggaaccgtaaaaaggccgcgttgctggcgtttttccataggctccgcccccctgacgagcatcacaaaaatcgacgctcaagtcagaggtggcgaaacccgacaggactataaagataccaggcgtttccccctggaagctccctcgtgcgctctcctgttccgaccctgccgcttaccggatacctgtccgcctttctcccttcgggaagcgtggcgctttctcatagctcacgctgtaggtatctcagttcggtgtaggtcgttcgctccaagctgggctgtgtgcacgaaccccccgttcagcccgaccgctgcgccttatccggtaactatcgtcttgagtccaacccggtaagacacgacttatcgccactggcagcagccactggtaacaggattagcagagcgaggtatgtaggcggtgctacagagttcttgaagtggtggcctaactacggctacactagaagaacagtatttggtatctgcgctctgctgaagccagttaccttcggaaaaagagttggtagctcttgatccggcaaacaaaccaccgctggtagcggtggtttttttgtttgcaagcagcagattacgcgcagaaaaaaaggatctcaagaagatcctttgatcttttctacggggtctgacgctcagtggaacgaaaactcacgttaagggattttggtcatgagattatcaaaaaggatcttcacctagatccttttaaattaaaaatgaagttttaaatcaatctaaagtatatatgagtaaacttggtctgacagttaccaatgcttaatcagtgaggcacctatctcagcgatctgtctatttcgttcatccatagttgcctgactccccgtcgtgtagataactacgatacgggagggcttaccatctggccccagtgctgcaatgataccgcgagacccacgctcaccggctccagatttatcagcaataaaccagccagccggaagggccgagcgcagaagtggtcctgcaactttatccgcctccatccagtctattaattgttgccgggaagctagagtaagtagttcgccagttaatagtttgcgcaacgttgttgccattgctacaggcatcgtggtgtcacgctcgtcgtttggtatggcttcattcagctccggttcccaacgatcaaggcgagttacatgatcccccatgttgtgcaaaaaagcggttagctccttcggtcctccgatcgttgtcagaagtaagttggccgcagtgttatcactcatggttatggcagcactgcataattctcttactgtcatgccatccgtaagatgcttttctgtgactggtgagtactcaaccaagtcattctgagaatagtgtatgcggcgaccgagttgctcttgcccggcgtcaatacgggataataccgcgccacatagcagaactttaaaagtgctcatcattggaaaacgttcttcggggcgaaaactctcaaggatcttaccgctgttgagatccagttcgatgtaacccactcgtgcacccaactgatcttcagcatcttttactttcaccagcgtttctgggtgagcaaaaacaggaaggcaaaatgccgcaaaaaagggaataagggcgacacggaaatgttgaatactcatactcttcctttttcaatattattgaagcatttatcagggttattgtctcatgagcggatacatatttgaatgtatttagaaaaataaacaaataggggttccgcgcacatttccccgaaaagtgccacctgacgtc

SEQ ID NO: 293 - DNA, 32 bp, Homo sapiens
acagtggggccactagggacaggattggtgac

SEQ ID NO: 294 - DNA, 37 bp, Artificial Sequence
  Synthetic
cgccaaaattaacgtcgccaggttcagctaaaaaacg

SEQ ID NO: 295 - RNA, 28 nt, Artificial Sequence
  Synthetic
gugaacugccgaguagguagcugauaac

SEQ ID NO: 296 - DNA, 145 bp, Artificial Sequence
  Synthetic
tgttgatgcaaccataaagtgatatttaataattatttataatcagcaacttaaccacaaaacaaccatatattgatatctcacaaaacaaccataagttgatatttttgtgaatcgagtatttcagcaaaactactgcagtaag

SEQ ID NO: 297 - DNA, 126 bp, Artificial Sequence
  Synthetic
tgttgatacaaccataaaatgataattacacccataaattgataattatcacacccataaattgatattgcctcttcatggtctaaacttcagtaagtttacgacattttcatgaagaggtcattc

SEQ ID NO: 298 - protein, 5 aa, Artificial Sequence
  Synthetic
GSGSG

SEQ ID NO: 299 - DNA, 139 bp, Artificial Sequence
  Synthetic
accaatgcaggcaaatcaaccttagtctgaaggcctaggcaaagaagaacacaacttacttcttaaggtcccctccaccccacatgttgatacaaccataaaatgataattacacccataaattgataattatcacacc

SEQ ID NO: 300 - DNA, 163 bp, Artificial Sequence
  Synthetic
aattattaaatatcactttatggttgcatcaacaccacagtggggcgaggtaggcgtgtacggtgggaggcctatataagcagagctcgtttagtgaaccgtcagatcgcctggagaattcgccaccatggactacaaggatgacgacgataaaacttccggt

SEQ ID NO: 301 - DNA, 18 bp, Artificial Sequence
  Synthetic
ccaccccacatgttgata

SEQ ID NO: 302 - DNA, 18 bp, Artificial Sequence
  Synthetic
catcaacaccacagtggg

SEQ ID NO: 303 - DNA, 29 bp, Artificial Sequence
  Synthetic
aggtcccctccaccccacatgttgataca

SEQ ID NO: 304 - DNA, 30 bp, Artificial Sequence
  Synthetic
cccctccaccccacatgttgatacaaccat

SEQ ID NO: 305 - DNA, 29 bp, Artificial Sequence
  Synthetic
  misc_feature (10)..(10): n is a, c, g, or t
aggtcccctnccccccccatgtcgctgca
